(19) United States
(12) Patent Application Publication
(10) Pub. No.: US 2005/0048507 A1
(43) Pub. Date: Mar. 3, 2005

(54) Therapeutic polypeptides, nucleic acids encoding same, and methods of use

(76) Inventors: Mei Zhong, Branford, CT (US); Xiaojia (Sasha) Guo, Branford, CT (US); David W. Anderson, Plantsville, CT (US); Tatiana Ort, Milford, CT (US); Muralidhara Padigaru, Mumbai (IN); Daniel Rieger, Branford, CT (US)

Correspondence Address: MINTZ, LEVIN, COHN, FERRIS, GLOVSKY;AND POPEO, P.C., ONE FINANCIAL CENTER, BOSTON, MA, 02111, US

(21) Appl. No.: 10/659,004

(22) Filed: Sep. 9, 2003

Related U.S. Application Data
(63) Continuation-in-part of application No. 10/162,335, filed on Jun. 3, 2002.
(63) Continuation-in-part of application No. 10/044,564, filed on Jan. 11, 2002.
(63) Continuation-in-part of application No. 10/094,886, filed on Mar. 7, 2002.
(60) Provisional application No. 60/295,607, filed on Jun. 4, 2001.
(60) Provisional application No. 60/295,661, filed on Jun. 4, 2001.
(60) Provisional application No. 60/296,404, filed on Jun. 6, 2001.
(60) Provisional application No. 60/296,418, filed on Jun. 6, 2001.
(60) Provisional application No. 60/297,414, filed on Jun. 11, 2001.
(60) Provisional application No. 60/297,567, filed on Jun. 12, 2001.
(60) Provisional application No. 60/298,285, filed on Jun. 14, 2001.
(60) Provisional application No. 60/298,556, filed on Jun. 15, 2001.
(60) Provisional application No. 60/299,949, filed on Jun. 21, 2001.
(60) Provisional application No. 60/300,883, filed on Jun. 26, 2001.
(60) Provisional application No. 60/301,550, filed on Jun. 28, 2001.
(60) Provisional application No. 60/311,972, filed on Aug. 13, 2001.
(60) Provisional application No. 60/315,069, filed on Aug. 27, 2001.
(60) Provisional application No. 60/315,071, filed on Aug. 27, 2001.
(60) Provisional application No. 60/315,660, filed on Aug. 29, 2001.
(60) Provisional application No. 60/322,293, filed on Sep. 14, 2001.
(60) Provisional application No. 60/322,706, filed on Sep. 17, 2001.
(60) Provisional application No. 60/341,186, filed on Dec. 14, 2001.
(60) Provisional application No. 60/361,189, filed on Feb. 28, 2002.
(60) Provisional application No. 60/363,673, filed on Mar. 12, 2002.
(60) Provisional application No. 60/363,676, filed on Mar. 12, 2002.
(60) Provisional application No. 60/261,014, filed on Jan. 11, 2001.
(60) Provisional application No. 60/261,018, filed on Jan. 11, 2001.
(60) Provisional application No. 60/318,410, filed on Sep. 10, 2001.
(60) Provisional application No. 60/261,013, filed on Jan. 11, 2001.
(60) Provisional application No. 60/261,029, filed on Jan. 11, 2001.
(60) Provisional application No. 60/261,026, filed on Jan. 11, 2001.
(60) Provisional application No. 60/313,170, filed on Aug. 17, 2001.
(60) Provisional application No. 60/274,322, filed on Mar. 8, 2001.
(60) Provisional application No. 60/313,182, filed on Aug. 17, 2001.
(60) Provisional application No. 60/288,052, filed on May 2, 2001.
(60) Provisional application No. 60/318,510, filed on Sep. 10, 2001.
(60) Provisional application No. 60/274,281, filed on Mar. 8, 2001.
(60) Provisional application No. 60/314,018, filed on Aug. 21, 2001.
(60) Provisional application No. 60/274,194, filed on Mar. 8, 2001.
(60) Provisional application No. 60/274,849, filed on Mar. 9, 2001.
(60) Provisional application No. 60/296,693, filed on Jun. 7, 2001.
(60) Provisional application No. 60/313,626, filed on Aug. 20, 2001.
(60) Provisional application No. 60/332,486, filed on Nov. 9, 2001.
(60) Provisional application No. 60/275,235, filed on Mar. 12, 2001.
(60) Provisional application No. 60/275,578, filed on Mar. 13, 2001.
(60) Provisional application No. 60/288,228, filed on May 2, 2001.
(60) Provisional application No. 60/275,579, filed on Mar. 13, 2001.
(60) Provisional application No. 60/312,916, filed on Aug. 16, 2001.
(60) Provisional application No. 60/275,601, filed on Mar. 13, 2001.
(60) Provisional application No. 60/311,978, filed on Aug. 13, 2001.
(60) Provisional application No. 60/276,000, filed on Mar. 14, 2001.
(60) Provisional application No. 60/276,776, filed on Mar. 16, 2001.
(60) Provisional application No. 60/296,856, filed on Jun. 8, 2001.
(60) Provisional application No. 60/276,994, filed on Mar. 19, 2001.
(60) Provisional application No. 60/291,766, filed on May 17, 2001.
(60) Provisional application No. 60/277,338, filed on Mar. 20, 2001.
(60) Provisional application No. 60/288,066, filed on May 2, 2001.
(60) Provisional application No. 60/277,239, filed on Mar. 20, 2001.
(60) Provisional application No. 60/315,227, filed on Aug. 27, 2001.
(60) Provisional application No. 60/318,403, filed on Sep. 10, 2001.
(60) Provisional application No. 60/277,327, filed on Mar. 20, 2001.
(60) Provisional application No. 60/277,791, filed on Mar. 21, 2001.
(60) Provisional application No. 60/325,378, filed on Sep. 27, 2001.
(60) Provisional application No. 60/277,833, filed on Mar. 22, 2001.
(60) Provisional application No. 60/278,152, filed on Mar. 23, 2001.
(60) Provisional application No. 60/310,913, filed on Aug. 8, 2001.
(60) Provisional application No. 60/303,237, filed on Jul. 5, 2001.
(60) Provisional application No. 60/278,894, filed on Mar. 26, 2001.
(60) Provisional application No. 60/322,360, filed on Sep. 14, 2001.
(60) Provisional application No. 60/279,036, filed on Mar. 27, 2001.
(60) Provisional application No. 60/312,191, filed on Aug. 14, 2001.
(60) Provisional application No. 60/278,999, filed on Mar. 27, 2001.
(60) Provisional application No. 60/280,233, filed on Mar. 30, 2001.
(60) Provisional application No. 60/303,230, filed on Jul. 5, 2001.
(60) Provisional application No. 60/345,399, filed on Nov. 9, 2001.
(60) Provisional application No. 60/322,296, filed on Sep. 14, 2001.
(60) Provisional application No. 60/280,802, filed on Apr. 2, 2001.
(60) Provisional application No. 60/414,832, filed on Sep. 30, 2002.
(60) Provisional application No. 60/409,544, filed on Sep. 10, 2002.
(60) Provisional application No. 60/413,342, filed on Sep. 25, 2002.
(60) Provisional application No. 60/412,767, filed on Sep. 23, 2002.
(60) Provisional application No. 60/412,766, filed on Sep. 23, 2002.
(60) Provisional application No. 60/411,060, filed on Sep. 16, 2002.
(60) Provisional application No. 60/412,825, filed on Sep. 23, 2002.
(60) Provisional application No. 60/410,320, filed on Sep. 12, 2002.
(60) Provisional application No. 60/409,145, filed on Sep. 9, 2002.

(51) Int. Cl. C12Q 1/68; G01N 33/53; C07K 14/47; A61K 38/17

(52) U.S. Cl. 435/6; 435/69.1; 435/320.1; 435/325; 530/350; 514/12; 536/23.5

(57) ABSTRACT

Disclosed herein are nucleic acid sequences that encode novel polypeptides. Also disclosed are polypeptides encoded by these nucleic acid sequences, and antibodies that immunospecifically bind to the polypeptide, as well as derivatives, variants, mutants, or fragments of the novel polypeptide, polynucleotide, or antibody specific to the polypeptide. Vectors, host cells, antibodies and recombinant methods for producing the polypeptides and polynucleotides, as well as methods for using same are also included. The invention further discloses therapeutic, diagnostic and research methods for diagnosis, treatment, and prevention of disorders involving any one of these novel human nucleic acids and proteins.

### RELATED APPLICATIONS

[0001] This application is a continuation-in-part of U.S. Ser. No. 10/162,335 filed Jun. 3, 2002, which claims benefit to U.S. Ser. No. 60/295,607 filed Jun. 4, 2001, U.S. Ser. No. 60/295,661 filed Jun. 4, 2001, U.S. Ser. No. 60/296,404 filed Jun. 6, 2001, U.S. Ser. No. 60/296,418 filed Jun. 6, 2001, U.S. Ser. No. 60/297,414 filed Jun. 11, 2001, U.S. Ser. No. 60/297,567 filed Jun. 12, 2001, U.S. Ser. No. 60/298,285 filed Jun. 14, 2001, U.S. Ser. No. 60/298,556 filed Jun. 15, 2001, U.S. Ser. No. 60/299,949 filed Jun. 21, 2001, U.S. Ser. No. 60/300,883 filed Jun. 26, 2001, U.S. Ser. No. 60/301,550 filed Jun. 28, 2001, U.S. Ser. No. 60/311,972 filed Aug. 13, 2001, U.S. Ser. No. 60/315,069 filed Aug. 27, 2001, U.S. Ser. No. 60/315,071 filed Aug. 27, 2001, U.S. Ser. No. 60/315,660 filed Aug. 29, 2001, U.S. Ser. No. 60/322,293 filed Sep. 14, 2001, U.S. Ser. No. 60/322,706 filed Sep. 17, 2001, U.S. Ser. No. 60/341,186 filed Dec. 14, 2001, U.S. Ser. No. 60/361,189 filed Feb. 28, 2002, U.S. Ser. No. 60/363,673 filed Mar. 12, 2002, and U.S. Ser. No. 60/363,676 filed Mar. 12, 2002; a continuation-in-part of U.S. Ser. No. 10/044,564 filed Jan. 11, 2002, which claims benefit to U.S. Ser. No. 60/261,014 filed Jan. 11, 2001, U.S. Ser. No. 60/261,018 filed 01/11/01, U.S. Ser. No. 60/318,410 filed Sep. 10, 2001, U.S. Ser. No. 60/261,013 filed Jan. 11, 2001, U.S. Ser. No. 60/261,029 filed 01/11/01, U.S. Ser. No. 60/261,026 filed 01/11/01, and U.S. Ser. No. 60/313,170 filed Aug. 17, 2001; a continuation-in-part of U.S. Ser. No. 10/094,886 filed Mar. 7, 2002, which claims benefit to U.S. Ser. No. 60/274,322 filed Mar. 8, 2001, U.S. Ser. No. 60/313,182 filed Aug. 17, 2001, U.S. Ser. No. 60/288,052 filed May 2, 2001, U.S. Ser. No. 60/318,510 filed Sep. 10, 2001, U.S. Ser. No. 60/274,281 filed Mar. 8, 2001, U.S. Ser. No. 60/314,018 filed Aug. 21, 2001, U.S. Ser. No. 60/274,194 filed Mar. 8, 2001, U.S. Ser. No. 60/274,849 filed Mar. 9, 2001, U.S. Ser. No. 60/296,693 filed Jun. 7, 2001, U.S. Ser. No. 60/313,626 filed Aug. 20, 2001, U.S. Ser. No. 60/332,486 filed Nov. 9, 2001, U.S. Ser. No. 60/275,235 filed Mar. 12, 2001, U.S. Ser. No. 60/275,578 filed Mar. 13, 2001, U.S. Ser. No. 60/288,228 filed May 2, 2001, U.S. Ser. No. 60/275,579 filed Mar. 13, 2001, U.S. Ser. No. 60/312,916 filed Aug. 16, 2001, U.S. Ser. No. 60/275,601 filed Mar. 13, 2001, U.S. Ser. No. 60/311,978 filed Aug. 13, 2001, U.S. Ser. No. 60/276,000 filed Mar. 14, 2001, U.S. Ser. No. 60/276,776 filed Mar. 16, 2001, U.S. Ser. No. 60/296,856 filed Jun. 8, 2001, U.S. Ser. No. 60/276,994 filed Mar. 19, 2001, U.S. Ser. No. 60/291,766 filed May 17, 2001, U.S. Ser. No. 60/277,338 filed Mar. 20, 2001, U.S. Ser. No. 60/288,066 filed May 2, 2001, U.S. Ser. No. 60/277,239 filed Mar. 20, 2001, U.S. Ser. No. 60/315,227 filed Aug. 27, 2001, U.S. Ser. No. 60/318,403 filed Sep. 10, 2001, U.S. Ser. No. 60/277,327 filed Mar. 20, 2001, U.S. Ser. No. 60/277,791 filed Mar. 21, 2001, U.S. Ser. No. 60/325,378 filed Sep. 27, 2001, U.S. Ser. No. 60/277,833 filed Mar. 22, 2001, U.S. Ser. No. 60/278,152 filed Mar. 23, 2001, U.S. Ser. No. 60/310,913 filed Aug. 8, 2001, U.S. Ser. No. 60/303,237, 07/5/01, U.S. Ser. No. 60/278,894 filed Mar. 26, 2001, U.S. Ser. No. 60/322,360 filed Sep. 14, 2001, U.S. Ser. No. 60/279,036 filed Mar. 27, 2001, U.S. Ser. No. 60/312,191,08/14/01, U.S. Ser. No. 60/278,999 filed Mar. 27, 2001, U.S. Ser. No. 60/280,233 filed Mar. 30, 2001, U.S. Ser. No. 60/303,230, 07/5/01, U.S. Ser. No. 60/345,399 filed Nov. 9, 2001, U.S. Ser. No. 60/322,296 filed Sep. 14, 2001, and U.S. Ser. No. 60/280,802 filed Apr. 2, 2001; and this application claims priority to provisional applications U.S. Ser. No. 60/414,832 filed Sep. 30, 2002, U.S. Ser. No. 60/409,544 filed Sep. 10, 2002, U.S. Ser. No. 60/413,342 filed Sep. 25, 2002, U.S. Ser. No. 60/412,767 filed Sep. 24, 2002, U.S. Ser. No. 60/412,766 filed Sep. 23, 2002, U.S. Ser. No. 60/411,060 filed Sep. 16, 2002, U.S. Ser. No. 60/412,825 filed Sep. 23, 2002, U.S. Ser. No. 60/410,320 filed Sep. 12, 2002, and U.S. Ser. No. 60/409,145 filed Sep. 9, 2002, all of which are incorporated herein by reference in their entirety.

### FIELD OF THE INVENTION

[0002] The present invention relates to novel polypeptides, and the nucleic acids encoding them, having properties related to stimulation of biochemical or physiological responses in a cell, a tissue, an organ or an organism. More particularly, the novel polypeptides are gene products of novel genes, or are specified biologically active fragments or derivatives thereof. Methods of use encompass diagnostic and prognostic assay procedures as well as methods of treating diverse pathological conditions.

### BACKGROUND OF THE INVENTION

[0003] Eukaryotic cells are characterized by biochemical and physiological processes which under normal conditions are exquisitely balanced to achieve the preservation and propagation of the cells. When such cells are components of multicellular organisms such as vertebrates, or more particularly organisms such as mammals, the regulation of the biochemical and physiological processes involves intricate signaling pathways. Frequently, such signaling pathways involve extracellular signaling proteins, cellular receptors that bind the signaling proteins, and signal transducing components located within the cells.

[0004] Signaling proteins may be classified as endocrine effectors, paracrine effectors or autocrine effectors. Endocrine effectors are signaling molecules secreted by a given organ into the circulatory system, which are then transported to a distant target organ or tissue. The target cells include the receptors for the endocrine effector, and when the endocrine effector binds, a signaling cascade is induced. Paracrine effectors involve secreting cells and receptor cells in close proximity to each other, for example two different classes of cells in the same tissue or organ. One class of cells secretes the paracrine effector, which then reaches the second class of cells, for example by diffusion through the extracellular fluid. The second class of cells contains the receptors for the paracrine effector; binding of the effector results in induction of the signaling cascade that elicits the corresponding biochemical or physiological effect. Autocrine effectors are highly analogous to paracrine effectors, except that the same cell type that secretes the autocrine effector also contains the receptor. Thus the autocrine effector binds to receptors on the same cell, or on identical neighboring cells. The binding process then elicits the characteristic biochemical or physiological effect.

[0005] Signaling processes may elicit a variety of effects on cells and tissues including by way of nonlimiting example induction of cell or tissue proliferation, suppression of growth or proliferation, induction of differentiation or maturation of a cell or tissue, and suppression of differentiation or maturation of a cell or tissue.

[0006] Many pathological conditions involve dysregulation of expression of important effector proteins. In certain classes of pathologies the dysregulation is manifested as diminished or suppressed level of synthesis and secretion of protein effectors. In other classes of pathologies the dysregulation is manifested as increased or up-regulated level of synthesis and secretion of protein effectors. In a clinical setting a subject may be suspected of suffering from a condition brought on by altered or mis-regulated levels of a protein effector of interest. Therefore there is a need to assay for the level of the protein effector of interest in a biological sample from such a subject, and to compare the level with that characteristic of a nonpathological condition. There also is a need to provide the protein effector as a product of manufacture. Administration of the effector to a subject in need thereof is useful in treatment of the pathological condition. Accordingly, there is a need for a method of treatment of a pathological condition brought on by a diminished or suppressed levels of the protein effector of interest. In addition, there is a need for a method of treatment of a pathological condition brought on by a increased or up-regulated levels of the protein effector of interest.

[0007] Antibodies are multichain proteins that bind specifically to a given antigen, and bind poorly, or not at all, to substances deemed not to be cognate antigens. Antibodies are comprised of two short chains termed light chains and two long chains termed heavy chains. These chains are constituted of immunoglobulin domains, of which generally there are two classes: one variable domain per chain, one constant domain in light chains, and three or more constant domains in heavy chains. The antigen-specific portion of the immunoglobulin molecules resides in the variable domains; the variable domains of one light chain and one heavy chain associate with each other to generate the antigen-binding moiety. Antibodies that bind immunospecifically to a cognate or target antigen bind with high affinities. Accordingly, they are useful in assaying specifically for the presence of the antigen in a sample. In addition, they have the potential of inactivating the activity of the antigen.

[0008] Therefore there is a need to assay for the level of a protein effector of interest in a biological sample from such a subject, and to compare this level with that characteristic of a nonpathological condition. In particular, there is a need for such an assay based on the use of an antibody that binds immunospecifically to the antigen. There further is a need to inhibit the activity of the protein effector in cases where a pathological condition arises from elevated or excessive levels of the effector based on the use of an antibody that binds immunospecifically to the effector. Thus, there is a need for the antibody as a product of manufacture. There further is a need for a method of treatment of a pathological condition brought on by an elevated or excessive level of the protein effector of interest based on administering the antibody to the subject.

### SUMMARY OF THE INVENTION

[0009] The invention is based in part upon the discovery of isolated polypeptides including amino acid sequences selected from mature forms of the amino acid sequences selected from the group consisting of SEQ ID NO:2n, wherein n is an integer between 1 and 71 or is 94. The novel nucleic acids and polypeptides are referred to herein as NOV1 a, NOV1 b, NOV1 b, NOV1 c, NOV2a, NOV2b, NOV2c, NOV2d, NOV3a, NOV3b, etc. These nucleic acids and polypeptides, as well as derivatives, homologs, analogs and fragments thereof, will hereinafter be collectively designated as “NOVX” nucleic acid or polypeptide sequences.

[0010] The invention also is based in part upon variants of a mature form of the amino acid sequence selected from the group consisting of SEQ ID NO:2n, wherein n is an integer between 1 and 71 or is 94, wherein any amino acid in the mature form is changed to a different amino acid, provided that no more than 15% of the amino acid residues in the sequence of the mature form are so changed. In another embodiment, the invention includes the amino acid sequences selected from the group consisting of SEQ ID NO:2n, wherein n is an integer between 1 and 71 or is 94. In another embodiment, the invention also comprises variants of the amino acid sequence selected from the group consisting of SEQ ID NO:2n, wherein n is an integer between 1 and 71 or is 94 wherein any amino acid specified in the chosen sequence is changed to a different amino acid, provided that no more than 15% of the amino acid residues in the sequence are so changed. The invention also involves fragments of any of the mature forms of the amino acid sequences selected from the group consisting of SEQ ID NO:2n, wherein n is an integer between 1 and 71 or is 94, or any other amino acid sequence selected from this group. The invention also comprises fragments from these groups in which up to 15% of the residues are changed.

[0011] In another embodiment, the invention encompasses polypeptides that are naturally occurring allelic variants of the sequence selected from the group consisting of SEQ ID NO:2n, wherein n is an integer between 1 and 71 or is 94. These allelic variants include amino acid sequences that are the translations of nucleic acid sequences differing by a single nucleotide from nucleic acid sequences selected from the group consisting of SEQ ID NOS: 2n-1, wherein n is an integer between 1 and 71. The variant polypeptide where any amino acid changed in the chosen sequence is changed to provide a conservative substitution.

[0012] In another embodiment, the invention comprises a pharmaceutical composition involving a polypeptide with an amino acid sequence selected from the group consisting of SEQ ID NO:2n, wherein n is an integer between 1 and 71 or is 94 and a pharmaceutically acceptable carrier. In another embodiment, the invention involves a kit, including, in one or more containers, this pharmaceutical composition.

[0013] In another embodiment, the invention includes the use of a therapeutic in the manufacture of a medicament for treating a syndrome associated with a human disease, the disease being selected from a pathology associated with a polypeptide with an amino acid sequence selected from the group consisting of SEQ ID NO:2n, wherein n is an integer between 1 and 71 or is 94wherein said therapeutic is the polypeptide selected from this group.

[0014] In another embodiment, the invention comprises a method for determining the presence or amount of a polypeptide with an amino acid sequence selected from the group consisting of SEQ ID NO:2n, wherein n is an integer between 1 and 71 or is 94 in a sample, the method involving providing the sample; introducing the sample to an antibody that binds immunospecifically to the polypeptide; and determining the presence or amount of antibody bound to the polypeptide, thereby determining the presence or amount of polypeptide in the sample.

[0015] In another embodiment, the invention includes a method for determining the presence of or predisposition to a disease associated with altered levels of a polypeptide with an amino acid sequence selected from the group consisting of SEQ ID NO:2n, wherein n is an integer between 1 and 71 or is 94 in a first mammalian subject, the method involving measuring the level of expression of the polypeptide in a sample from the first mammalian subject; and comparing the amount of the polypeptide in this sample to the amount of the polypeptide present in a control sample from a second mammalian subject known not to have, or not to be predisposed to, the disease, wherein an alteration in the expression level of the polypeptide in the first subject as compared to the control sample indicates the presence of or predisposition to the disease.

[0016] In another embodiment, the invention involves a method of identifying an agent that binds to a polypeptide with an amino acid sequence selected from the group consisting of SEQ ID NO:2n, wherein n is an integer between 1 and 71 or is 94, the method including introducing the polypeptide to the agent; and determining whether the agent binds to the polypeptide. The agent could be a cellular receptor or a downstream effector.

[0017] In another embodiment, the invention involves a method for identifying a potential therapeutic agent for use in treatment of a pathology, wherein the pathology is related to aberrant expression or aberrant physiological interactions of a polypeptide with an amino acid sequence selected from the group consisting of SEQ ID NO:2n, wherein n is an integer between 1 and 71 or is 94, the method including providing a cell expressing the polypeptide of the invention and having a property or function ascribable to the polypeptide; contacting the cell with a composition comprising a candidate substance; and determining whether the substance alters the property or function ascribable to the polypeptide; whereby, if an alteration observed in the presence of the substance is not observed when the cell is contacted with a composition devoid of the substance, the substance is identified as a potential therapeutic agent.

[0018] In another embodiment, the invention involves a method for screening for a modulator of activity or of latency or predisposition to a pathology associated with a polypeptide having an amino acid sequence selected from the group consisting of SEQ ID NO:2n, wherein n is an integer between 1 and 71 or is 94, the method including administering a test compound to a test animal at increased risk for a pathology associated with the polypeptide of the invention, wherein the test animal recombinantly expresses the polypeptide of the invention; measuring the activity of the polypeptide in the test animal after administering the test compound; and comparing the activity of the protein in the test animal with the activity of the polypeptide in a control animal not administered the polypeptide, wherein a change in the activity of the polypeptide in the test animal relative to the control animal indicates the test compound is a modulator of latency of, or predisposition to, a pathology associated with the polypeptide of the invention. The recombinant test animal could express a test protein transgene or express the transgene under the control of a promoter at an increased level relative to a wild-type test animal The promoter may or may not b the native gene promoter of the transgene.

[0019] In another embodiment, the invention involves a method for modulating the activity of a polypeptide with an amino acid sequence selected from the group consisting of SEQ ID NO:2n, wherein n is an integer between 1 and 71 or is 94, the method including introducing a cell sample expressing the polypeptide with a compound that binds to the polypeptide in an amount sufficient to modulate the activity of the polypeptide.

[0020] In another embodiment, the invention involves a method of treating or preventing a pathology associated with a polypeptide with an amino acid sequence selected from the group consisting of SEQ ID NO:2n, wherein n is an integer between 1 and 71 or is 94, the method including administering the polypeptide to a subject in which such treatment or prevention is desired in an amount sufficient to treat or prevent the pathology in the subject. The subject could be human.

[0021] In another embodiment, the invention involves a method of treating a pathological state in a mammal, the method including administering to the mammal a polypeptide in an amount that is sufficient to alleviate the pathological state, wherein the polypeptide is a polypeptide having an amino acid sequence at least 95% identical to a polypeptide having the amino acid sequence selected from the group consisting of SEQ ID NO:2n, wherein n is an integer between 1 and 71 or is 94 or a biologically active fragment thereof.

[0022] In another embodiment, the invention involves an isolated nucleic acid molecule comprising a nucleic acid sequence encoding a polypeptide having an amino acid sequence selected from the group consisting of a mature form of the amino acid sequence given SEQ ID NO:2n, wherein n is an integer between 1 and 71 or is 94; a variant of a mature form of the amino acid sequence selected from the group consisting of SEQ ID NO:2n, wherein n is an integer between 1 and 71 or is 94 wherein any amino acid in the mature form of the chosen sequence is changed to a different amino acid, provided that no more than 15% of the amino acid residues in the sequence of the mature form are so changed; the amino acid sequence selected from the group consisting of SEQ ID NO:2n, wherein n is an integer between 1 and 71 or is 94; a variant of the amino acid sequence selected from the group consisting of SEQ ID NO:2n, wherein n is an integer between 1 and 71 or is 94, in which any amino acid specified in the chosen sequence is changed to a different amino acid, provided that no more than 15% of the amino acid residues in the sequence are so changed; a nucleic acid fragment encoding at least a portion of a polypeptide comprising the amino acid sequence selected from the group consisting of SEQ ID NO:2n, wherein n is an integer between 1 and 71 or is 94 or any variant of the polypeptide wherein any amino acid of the chosen sequence is changed to a different amino acid, provided that no more than 10% of the amino acid residues in the sequence are so changed; and the complement of any of the nucleic acid molecules.

[0023] In another embodiment, the invention comprises an isolated nucleic acid molecule having a nucleic acid sequence encoding a polypeptide comprising an amino acid sequence selected from the group consisting of a mature form of the amino acid sequence given SEQ ID NO:2n, wherein n is an integer between 1 and 71 or is 94, wherein the nucleic acid molecule comprises the nucleotide sequence of a naturally occurring allelic nucleic acid variant.

[0024] In another embodiment, the invention involves an isolated nucleic acid molecule including a nucleic acid sequence encoding a polypeptide having an amino acid sequence selected from the group consisting of a mature form of the amino acid sequence given SEQ ID NO:2n, wherein n is an integer between 1 and 71 or is 94 that encodes a variant polypeptide, wherein the variant polypeptide has the polypeptide sequence of a naturally occurring polypeptide variant.

[0025] In another embodiment, the invention comprises an isolated nucleic acid molecule having a nucleic acid sequence encoding a polypeptide comprising an amino acid sequence selected from the group consisting of a mature form of the amino acid sequence given SEQ ID NO:2n, wherein n is an integer between 1 and 71 or is 94, wherein the nucleic acid molecule differs by a single nucleotide from a nucleic acid sequence selected from the group consisting of SEQ ID NOS: 2n-1, wherein n is an integer between 1 and 71 or is 94.

[0026] In another embodiment, the invention includes an isolated nucleic acid molecule having a nucleic acid sequence encoding a polypeptide including an amino acid sequence selected from the group consisting of a mature form of the amino acid sequence given SEQ ID NO:2n, wherein n is an integer between 1 and 71 or is 94, wherein the nucleic acid molecule comprises a nucleotide sequence selected from the group consisting of the nucleotide sequence selected from the group consisting of SEQ ID NO:2n-1, wherein n is an integer between 1 and 71; a nucleotide sequence wherein one or more nucleotides in the nucleotide sequence selected from the group consisting of SEQ ID NO:2n-1, wherein n is an integer between 1 and 71 is changed from that selected from the group consisting of the chosen sequence to a different nucleotide provided that no more than 15% of the nucleotides are so changed; a nucleic acid fragment of the sequence selected from the group consisting of SEQ ID NO:2n-1, wherein n is an integer between 1 and 71; and a nucleic acid fragment wherein one or more nucleotides in the nucleotide sequence selected from the group consisting of SEQ ID NO:2n-1, wherein n is an integer between 1 and 71 is changed from that selected from the group consisting of the chosen sequence to a different nucleotide provided that no more than 15% of the nucleotides are so changed.

[0027] In another embodiment, the invention includes an isolated nucleic acid molecule having a nucleic acid sequence encoding a polypeptide including an amino acid sequence selected from the group consisting of a mature form of the amino acid sequence given SEQ ID NO:2n, wherein n is an integer between 1 and 71 or is 94, wherein the nucleic acid molecule hybridizes under stringent conditions to the nucleotide sequence selected from the group consisting of SEQ ID NO:2n-1, wherein n is an integer between 1 and 71, or a complement of the nucleotide sequence.

[0028] In another embodiment, the invention includes an isolated nucleic acid molecule having a nucleic acid sequence encoding a polypeptide including an amino acid sequence selected from the group consisting of a mature form of the amino acid sequence given SEQ ID NO:2n, wherein n is an integer between 1 and 71 or is 94, wherein the nucleic acid molecule has a nucleotide sequence in which any nucleotide specified in the coding sequence of the chosen nucleotide sequence is changed from that selected from the group consisting of the chosen sequence to a different nucleotide provided that no more than 15% of the nucleotides in the chosen coding sequence are so changed, an isolated second polynucleotide that is a complement of the first polynucleotide, or a fragment of any of them.

[0029] In another embodiment, the invention includes a vector involving the nucleic acid molecule having a nucleic acid sequence encoding a polypeptide including an amino acid sequence selected from the group consisting of a mature form of the amino acid sequence given SEQ ID NO:2n, wherein n is an integer between 1 and 71 or is 94. This vector can have a promoter operably linked to the nucleic acid molecule. This vector can be located within a cell.

[0030] In another embodiment, the invention involves a method for determining the presence or amount of a nucleic acid molecule having a nucleic acid sequence encoding a polypeptide including an amino acid sequence selected from the group consisting of a mature form of the amino acid sequence given SEQ ID NO:2n, wherein n is an integer between 1 and 71 or is 94 in a sample, the method including providing the sample; introducing the sample to a probe that binds to the nucleic acid molecule; and determining the presence or amount of the probe bound to the nucleic acid molecule, thereby determining the presence or amount of the nucleic acid molecule in the sample. The presence or amount of the nucleic acid molecule is used as a marker for cell or tissue type. The cell type can be cancerous.

[0031] In another embodiment, the invention involves a method for determining the presence of or predisposition for a disease associated with altered levels of a nucleic acid molecule having a nucleic acid sequence encoding a polypeptide including an amino acid sequence selected from the group consisting of a mature form of the amino acid sequence given SEQ ID NO:2n, wherein n is an integer between 1 and 71 or is 94 in a first mammalian subject, the method including measuring the amount of the nucleic acid in a sample from the first mammalian subject; and comparing the amount of the nucleic acid in the sample of step (a) to the amount of the nucleic acid present in a control sample from a second mammalian subject known not to have or not be predisposed to, the disease; wherein an alteration in the level of the nucleic acid in the first subject as compared to the control sample indicates the presence of or predisposition to the disease.

[0032] The invention further provides an antibody that binds immunospecifically to a NOVX polypeptide. The NOVX antibody may be monoclonal, humanized, or a fully human antibody. Preferably, the antibody has a dissociation constant for the binding of the NOVX polypeptide to the antibody less than 1×10⁻⁹ M. More preferably, the NOVX antibody neutralizes the activity of the NOVX polypeptide.

[0033] In a further aspect, the invention provides for the use of a therapeutic in the manufacture of a medicament for treating a syndrome associated with a human disease, associated with a NOVX polypeptide. Preferably the therapeutic is a NOVX antibody.

[0034] In yet a further aspect, the invention provides a method of treating or preventing a NOVX-associated disorder, a method of treating a pathological state in a mammal, and a method of treating or preventing a pathology associated with a polypeptide by administering a NOVX antibody to a subject in an amount sufficient to treat or prevent the disorder.

[0035] Unless otherwise defined, all technical and scientific terms used herein have the same meaning as commonly understood by one of ordinary skill in the art to which this invention belongs. Although methods and materials similar or equivalent to those described herein can be used in the practice or testing of the present invention, suitable methods and materials are described below. All publications, patent applications, patents, and other references mentioned herein are incorporated by reference in their entirety. In the case of conflict, the present specification, including definitions, will control. In addition, the materials, methods, and examples are illustrative only and are not intended to be limiting.

[0036] Other features and advantages of the invention will be apparent from the following detailed description and claims.

### DETAILED DESCRIPTION OF THE INVENTION

[0037] The present invention provides novel nucleotides and polypeptides encoded thereby. Included in the invention are the novel nucleic acid sequences, their encoded polypeptides, antibodies, and other related compounds. The sequences are collectively referred to herein as “NOVX nucleic acids” or “NOVX polynucleotides” and the corresponding encoded polypeptides are referred to as “NOVX polypeptides” or “NOVX proteins.” Unless indicated otherwise, “NOVX” is meant to refer to any of the novel sequences disclosed herein. Table A provides a summary of the NOVX nucleic acids and their encoded polypeptides.

TABLE A
Sequences and Corresponding SEQ ID Numbers

| | | SEQ ID NO | SEQ ID NO | |
|---|---|---|---|---|
| NOVX | Internal | (nucleic | (amino | |
| Assignment | Identification | acid) | acid) | Homology |
| NOV1a | CG101729-02 | 1 | 2 | Fibroblast growth factor receptor 4 - |
| | | | | Homo sapiens |
| NOV1b | SNP 13374536 | 3 | 4 | Fibroblast growth factor receptor 4 - |
| | | | | Homo sapiens |
| NOV1c | SNP 13374538 | 5 | 6 | Fibroblast growth factor receptor 4 - |
| | | | | Homo sapiens |
| NOV1d | SNP 13375033 | 7 | 8 | Fibroblast growth factor receptor 4 - |
| | | | | Homo sapiens |
| NOV1e | SNP 13375034 | 9 | 10 | Fibroblast growth factor receptor 4 - |
| | | | | Homo sapiens |
| NOV1f | SNP 13375035 | 11 | 12 | Fibroblast growth factor receptor 4 - |
| | | | | Homo sapiens |
| NOV1g | SNP 13375036 | 13 | 14 | Fibroblast growth factor receptor 4 - |
| | | | | Homo sapiens |
| NOV1h | SNP 13375039 | 15 | 16 | Fibroblast growth factor receptor 4 - |
| | | | | Homo sapiens |
| NOV1i | SNP 13375041 | 17 | 18 | Fibroblast growth factor receptor 4 - |
| | | | | Homo sapiens |
| NOV1j | SNP 13375042 | 19 | 20 | Fibroblast growth factor receptor 4 - |
| | | | | Homo sapiens |
| NOV1k | SNP 13375043 | 21 | 22 | Fibroblast growth factor receptor 4 - |
| | | | | Homo sapiens |
| NOV1l | SNP 13375045 | 23 | 24 | Fibroblast growth factor receptor 4 - |
| | | | | Homo sapiens |
| NOV1m | SNP 13375046 | 25 | 26 | Fibroblast growth factor receptor 4 - |
| | | | | Homo sapiens |
| NOV1n | SNP 13375047 | 27 | 28 | Fibroblast growth factor receptor 4 - |
| | | | | Homo sapiens |
| NOV1o | SNP 13378017 | 29 | 30 | Fibroblast growth factor receptor 4 - |
| | | | | Homo sapiens |
| NOV1p | SNP 13378286 | 31 | 32 | Fibroblast growth factor receptor 4 - |
| | | | | Homo sapiens |
| NOV1q | SNP 13379321 | 33 | 34 | Fibroblast growth factor receptor 4 - |
| | | | | Homo sapiens |
| NOV1r | SNP 13379599 | 35 | 36 | Fibroblast growth factor receptor 4 - |
| | | | | Homo sapiens |
| NOV1s | SNP 13381615 | 37 | 38 | Fibroblast growth factor receptor 4 - |
| | | | | Homo sapiens |
| NOV1t | CG101729 | 39 | 40 | Fibroblast growth factor receptor 4 - |
| | | | | Homo sapiens |
| NOV2a | CG124800-02 | 41 | 42 | Complement factor I precursor (EC |
| | | | | 3.4.21.45) (C3B/C4B inactivator) - |
| | | | | Homo sapiens |
| NOV3a | CG185793-02 | 43 | 44 | Matrix metalloproteinase-15 |
| | | | | precursor (EC 3.4.24.-) (MMP-15) - |
| | | | | Homo sapiens |
| NOV4a | CG186317-02 | 45 | 46 | MDC3 (ADAM22 protein) - Homo |
| | | | | sapiens |
| NOV5a | CG192920-02 | 47 | 48 | T-lymphocyte surface antigen Ly-9 |
| | | | | precursor (Lymphocyte antigen 9) |
| | | | | (Cell-surface molecule Ly-9) |
| | | | | (CD229 antigen) - Homo sapiens |
| NOV5b | 314409072 | 49 | 50 | T-lymphocyte surface antigen Ly-9 |
| | | | | precursor (Lymphocyte antigen 9) |
| | | | | (Cell-surface molecule Ly-9) |
| | | | | (CD229 antigen) - Homo sapiens |
| NOV5c | CG192920 | | 188 | T-lymphocyte surface antigen Ly-9 |
| | | | | precursor (Lymphocyte antigen 9) |
| | | | | (Cell-surface molecule Ly-9) |
| | | | | (CD229 antigen) - Homo sapiens |
| NOV6a | CG54470-03 | 51 | 52 | Fibroblast growth factor-21 |
| | | | | precursor (FGF-21) - Homo sapiens |
| NOV6b | 309326568 | 53 | 54 | Fibroblast growth factor-21 |
| | | | | precursor (FGF-21) - Homo sapiens |
| NOV6c | SNP 13374914 | 55 | 56 | Fibroblast growth factor-21 |
| | | | | precursor (FGF-21) - Homo sapiens |
| NOV6d | SNP 13374915 | 57 | 58 | Fibroblast growth factor-21 |
| | | | | precursor (FGF-21 ) - Homo sapiens |
| NOV6e | SNP 13374916 | 59 | 60 | Fibroblast growth factor-21 |
| | | | | precursor (FGF-21) - Homo sapiens |
| NOV6f | SNP 13374917 | 61 | 62 | Fibroblast growth factor-21 |
| | | | | precursor (FGF-21) - Homo sapiens |
| NOV6g | SNP 13374918 | 63 | 64 | Fibroblast growth factor-21 |
| | | | | precursor (FGF-21) - Homo sapiens |
| NOV6h | SNP 13374919 | 65 | 66 | Fibroblast growth factor-21 |
| | | | | precursor (FGF-21) - Homo sapiens |
| NOV6i | SNP 13374920 | 67 | 68 | Fibroblast growth factor-21 |
| | | | | precursor (FGF-21) - Homo sapiens |
| NOV6j | SNP 13374921 | 69 | 70 | Fibroblast growth factor-21 |
| | | | | precursor (FGF-21) - Homo sapiens |
| NOV6k | SNP 13374922 | 71 | 72 | Fibroblast growth factor-21 |
| | | | | precursor (FGF-21) - Homo sapiens |
| NOV6l | SNP 13382579 | 73 | 74 | Fibroblast growth factor-21 |
| | | | | precursor (FGF-21) - Homo sapiens |
| NOV6m | CG54770-02 | 75 | 76 | Fibroblast growth factor-21 |
| | | | | precursor (FGF-21) - Homo sapiens |
| NOV7a | CG55051-02 | 77 | 78 | alpha-2 macroglobulin-like |
| | | | | polypeptide variant - Homo sapiens |
| NOV7b | SNP 13377623 | 79 | 80 | alpha-2 macroglobulin-like |
| | | | | polypeptide variant - Homo sapiens |
| NOV7c | CG55051 | 81 | 82 | alpha-2 macroglobulin-like |
| | | | | polypeptide variant - Homo sapiens |
| NOV8a | CG55060-04 | 83 | 84 | Antileukoproteinase 1 precursor |
| | | | | (ALP) - Homo sapiens |
| NOV8b | SNP 13374945 | 85 | 86 | Antileukoproteinase 1 precursor |
| | | | | (ALP) Homo sapiens |
| NOV8c | SNP 13376226 | 87 | 88 | Antileukoproteinase 1 precursor |
| | | | | (ALP) - Homo sapiens |
| NOV8d | SNP 13377692 | 89 | 90 | Antileukoproteinase 1 precursor |
| | | | | (ALP) - Homo sapiens |
| NOV8e | SNP 13378858 | 91 | 92 | Antileukoproteinase 1 precursor |
| | | | | (ALP) - Homo sapiens |
| NOV8f | SNP 13378859 | 93 | 94 | Antileukoproteinase 1 precursor |
| | | | | (ALP) - Homo sapiens |
| NOV8g | CG55060 | 95 | 96 | Antileukoproteinase 1 precursor |
| | | | | (ALP) - Homo sapiens |
| NOV9a | CG56008-01 | 97 | 98 | LIV-1 protein - human |
| NOV9b | CG56008-02 | 99 | 100 | LIV-1 protein - human |
| NOV9c | CG56008-03 | 101 | 102 | LIV-1 protein - human |
| NOV9d | CG56008-04 | 103 | 104 | LIV-1 protein - human |
| NOV9e | CG56008-05 | 105 | 106 | LIV-1 protein - human |
| NOV9f | CG56008-06 | 107 | 108 | LIV-1 protein - human |
| NOV9g | 311531751 | 109 | 110 | LIV-1 protein - human |
| NOV9h | SNP 13376562 | 111 | 112 | LIV-1 protein - human |
| NOV9i | CG56008 | 113 | 114 | LIV-1 protein - human |
| NOV10a | CG59356-01 | 115 | 116 | Nuclear hormone receptor NOR-1 |
| | | | | (Neuron-derived orphan receptor 1) |
| | | | | (Mitogen induced nuclear orphan |
| | | | | receptor) - Homo sapiens |
| NOV11a | CG59889-04 | 117 | 118 | Transmembrane protein-like |
| NOV11b | CG59889-01 | 119 | 120 | Transmembrane protein-like |
| NOV11c | CG59889-07 | 121 | 122 | Transmembrane protein-like |
| NOV11d | CG59889-09 | 123 | 124 | Transmembrane protein-like |
| NOV11e | CG59889-10 | 125 | 126 | Transmembrane protein-like |
| NOV11f | CG59889-11 | 127 | 128 | Transmembrane protein-like |
| NOV11g | CG59889-12 | 129 | 130 | Transmembrane protein-like |
| NOV11h | CG59889-13 | 131 | 132 | Transmembrane protein-like |
| NOV11i | 311979177 | 133 | 134 | Transmembrane protein-like |
| NOV11j | 314361479 | 135 | 136 | Transmembrane protein-like |
| NOV12a | CG88912-02 | 137 | 138 | Beta-neoendorphin-dynorphin |
| | | | | precursor (Proenkephalin B) |
| | | | | (Preprodynorphin) - Homo sapiens |
| NOV12b | CG88912-01 | 139 | 140 | Beta-neoendorphin-dynorphin |
| | | | | precursor (Proenkephalin B) |
| | | | | (Preprodynorphin) - Homo sapiens |
| NOV12c | 310907706 | 141 | 142 | Beta-neoendorphin-dynorphin |
| | | | | precursor (Proenkephalin B) |
| | | | | (Preprodynorphin) - Homo sapiens |

[0038] Table A indicates the homology of NOVX polypeptides to known protein families. Thus, the nucleic acids and polypeptides, antibodies and related compounds according to the invention corresponding to a NOVX as identified in column 1 of Table A are useful in therapeutic and diagnostic applications implicated in, for example, pathologies and disorders associated with the known protein families identified in column 5 of Table A.

[0039] Pathologies, diseases, disorders and condition and the like that are associated with NOVX sequences include, but are not limited to: e.g., cardiomyopathy, atherosclerosis, hypertension, congenital heart defects, aortic stenosis, atrial septal defect (ASD), vascular calcification, fibrosis, atrioventricular (A-V) canal defect, ductus arteriosus, pulmonary stenosis, subaortic stenosis, ventricular septal defect (VSD), valve diseases, tuberous sclerosis, scleroderma, obesity, metabolic disturbances associated with obesity, transplantation, osteoarthritis, rheumatoid arthritis, osteochondrodysplasia, adrenoleukodystrophy, congenital adrenal hyperplasia, prostate cancer, diabetes, metabolic disorders, neoplasm; adenocarcinoma, lymphoma, uterus cancer, fertility, glomerulonephritis, hemophilia, hypercoagulation, idiopathic thrombocytopenic purpura, immunodeficiencies, psoriasis, skin disorders, graft versus host disease, AIDS, bronchial asthma, lupus, Crohn's disease; inflammatory bowel disease, ulcerative colitis, multiple sclerosis, treatment of Albright Hereditary Ostoeodystrophy, infectious disease, anorexia, cancer-associated cachexia, cancer, neurodegenerative disorders, Alzheimers Disease, Parkinson's Disorder, immune disorders, hematopoietic disorders, and the various dyslipidemias, schizophrenia, depression, asthma, emphysema, allergies, the metabolic syndrome X and wasting disorders associated with chronic diseases and various cancers, as well as conditions such as transplantation, neuroprotection, fertility, or regeneration (in vitro and in vivo).

[0040] NOVX polypeptides of the present invention show homology to, and contain domains that are characteristic of members of such protein families. Details of the sequence relatedness and domain analysis for each NOVX are presented in Example A.

[0041] The NOVX nucleic acids and polypeptides are used to screen for molecules, which inhibit or enhance NOVX activity or function. Specifically, the nucleic acids and polypeptides according to the invention are used as targets for the identification of small molecules that modulate or inhibit associated diseases.

[0042] The NOVX nucleic acids and polypeptides are also useful for detecting and differentiating specific cell types, tissues, pathological tissues, cell activation states and the like. Details of expression analysis for each NOVX are presented in Example C. Accordingly, the NOVX nucleic acids, polypeptides, antibodies and related compounds according to the invention have diagnostic and therapeutic applications in the detection of a variety of diseases with differential expression in normal vs. diseased tissues, e.g. detection of cancer.

[0043] Additional utilities for NOVX nucleic acids and polypeptides according to the invention are disclosed herein.

[0044] NOVX Clones

[0045] The NOVX nucleic acids and proteins of the invention are useful in potential diagnostic and therapeutic applications and as a research tool. These include serving as a specific or selective nucleic acid or protein diagnostic and/or prognostic marker, wherein the presence or amount of the nucleic acid or the protein are to be assessed, as well as potential therapeutic applications such as the following: (i) a protein therapeutic, (ii) a small molecule drug target, (iii) an antibody target (therapeutic, diagnostic, drug targeting/cytotoxic antibody), (iv) a nucleic acid useful in gene therapy (gene delivery/gene ablation), and (v) a composition promoting tissue regeneration in vitro and in vivo (vi) a biological defense weapon.

[0046] In one specific embodiment, the invention includes an isolated polypeptide comprising an amino acid sequence selected from the group consisting of: (a) a mature form of the amino acid sequence selected from the group consisting of SEQ ID NO: 2n, wherein n is an integer between 1 and 71 or is 94; (b) a variant of a mature form of the amino acid sequence selected from the group consisting of SEQ ID NO: 2n, wherein n is an integer between 1 and 71 or is 94, wherein any amino acid in the mature form is changed to a different amino acid, provided that no more than 15%, no more than 10%, no more than 5% no more than 2% or no more than 1% of the amino acid residues in the sequence of the mature form are so changed; (c) an amino acid sequence selected from the group consisting of SEQ ID NO: 2n, wherein n is an integer between 1 and 71 or is 94; (d) a variant of the amino acid sequence selected from the group consisting of SEQ ID NO:2n, wherein n is an integer between 1 and 71 or is 94 wherein any amino acid specified in the chosen sequence is changed to a different amino acid, provided that no more than 15%, no more than 10%, no more than 5% no more than 2% or no more than 1% of the amino acid residues in the sequence are so changed; and (e) a fragment of any of (a) through (d).

[0047] In another specific embodiment, the invention includes an isolated nucleic acid molecule comprising a nucleic acid sequence encoding a NOVX polypeptide comprising an amino acid sequence selected from the group consisting of: (a) a mature form of the amino acid sequence given SEQ ID NO: 2n, wherein n is an integer between 1 and 71 or is 94; (b) a variant of a mature form of the amino acid sequence selected from the group consisting of SEQ ID NO: 2n, wherein n is an integer between 1 and 71 or is 94 wherein any amino acid in the mature form of the chosen sequence is changed to a different amino acid, provided that no more than 15%, no more than 10%, no more than 5%, no more than 2%, or no more than 1% of the amino acid residues in the sequence of the mature form are so changed; (c) the amino acid sequence selected from the group consisting of SEQ ID NO: 2n, wherein n is an integer between 1 and 71 or is 94; (d) a variant of the amino acid sequence selected from the group consisting of SEQ ID NO: 2n, wherein n is an integer between 1 and 71 or is 94, in which any amino acid specified in the chosen sequence is changed to a different amino acid, provided that no more than 15%, no more than 10%, no more than 5%, no more than 2%, or no more than 1% of the amino acid residues in the sequence are so changed; (e) a nucleic acid fragment encoding at least a portion of a polypeptide comprising the amino acid sequence selected from the group consisting of SEQ ID NO: 2n, wherein n is an integer between 1 and 71 or is 94 or any variant of said polypeptide wherein any amino acid of the chosen sequence is changed to a different amino acid, provided that no more than 15%, no more than 10%, no more than 5%, no more than 2%, or no more than 1% of the amino acid residues in the sequence are so changed; and (f) the complement of any of said nucleic acid molecules.

[0048] In yet another specific embodiment, the invention includes an isolated nucleic acid molecule, wherein said nucleic acid molecule comprises a nucleotide sequence selected from the group consisting of: (a) the nucleotide sequence selected from the group consisting of SEQ ID NO: 2n-1, wherein n is an integer between 1 and 71; (b) a nucleotide sequence wherein one or more nucleotides in the nucleotide sequence selected from the group consisting of SEQ ID NO: 2n-1, wherein n is an integer between 1 and 71 is changed from that selected from the group consisting of the chosen sequence to a different nucleotide provided that no more than 15%, no more than 10%, no more than 5%, no more than 2%, or no more than 1% of the nucleotides are so changed; (c) a nucleic acid fragment of the sequence selected from the group consisting of SEQ ID NO: 2n-1, wherein n is an integer between 1 and 71; and (d) a nucleic acid fragment wherein one or more nucleotides in the nucleotide sequence selected from the group consisting of SEQ ID NO: 2n-1, wherein n is an integer between 1 and 71 is changed from that selected from the group consisting of the chosen sequence to a different nucleotide provided that no more than 15%, no more than 10%, no more than 5%, no more than 2%, or no more than 1% of the nucleotides are so changed.

[0049] NOVX Nucleic Acids and Polypeptides

[0050] One aspect of the invention pertains to isolated nucleic acid molecules that encode NOVX polypeptides or biologically active portions thereof. Also included in the invention are nucleic acid fragments sufficient for use as hybridization probes to identify NOVX-encoding nucleic acids (e.g., NOVX mRNAs) and fragments for use as PCR primers for the amplification and/or mutation of NOVX nucleic acid molecules. As used herein, the term “nucleic acid molecule” is intended to include DNA molecules (e.g., cDNA or genomic DNA), RNA molecules (e.g., mRNA), analogs of the DNA or RNA generated using nucleotide analogs, and derivatives, fragments and homologs thereof. The nucleic acid molecule may be single-stranded or double-stranded, but preferably is comprised of double-stranded DNA.

[0051] A NOVX nucleic acid can encode a mature NOVX polypeptide. As used herein, a “mature” form of a polypeptide or protein disclosed in the present invention is the product of a naturally occurring polypeptide or precursor form or proprotein. The naturally occurring polypeptide, precursor or proprotein includes, by way of nonlimiting example, the full-length gene product encoded by the corresponding gene. Alternatively, it may be defined as the polypeptide, precursor or proprotein encoded by an ORF described herein. The product “mature” form arises, by way of nonlimiting example, as a result of one or more naturally occurring processing steps that may take place within the cell (e.g., host cell) in which the gene product arises. Examples of such processing steps leading to a “mature” form of a polypeptide or protein include the cleavage of the N-terminal methionine residue encoded by the initiation codon of an ORF, or the proteolytic cleavage of a signal peptide or leader sequence. Thus a mature form arising from a precursor polypeptide or protein that has residues 1 to N, where residue 1 is the N-terminal methionine, would have residues 2 through N remaining after removal of the N-terminal methionine. Alternatively, a mature form arising from a precursor polypeptide or protein having residues 1 to N, in which an N-terminal signal sequence from residue 1 to residue M is cleaved, would have the residues from residue M+1 to residue N remaining. Further as used herein, a “mature” form of a polypeptide or protein may arise from a step of post-translational modification other than a proteolytic cleavage event. Such additional processes include, by way of non-limiting example, glycosylation, myristylation or phosphorylation. In general, a mature polypeptide or protein may result from the operation of only one of these processes, or a combination of any of them.

[0052] The term “probe”, as utilized herein, refers to nucleic acid sequences of variable length, preferably between at least about 10 nucleotides (nt), about 100 nt, or as many as approximately 6,000 nt, depending upon the specific use. Probes are used in the detection of identical, similar, or complementary nucleic acid sequences. Longer length probes are generally obtained from a natural or recombinant source, are highly specific, and much slower to hybridize than shorter-length oligomer probes. Probes may be single-stranded or double-stranded and designed to have specificity in PCR, membrane-based hybridization technologies, or ELISA-like technologies.

[0053] The term “isolated” nucleic acid molecule, as used herein, is a nucleic acid that is separated from other nucleic acid molecules which are present in the natural source of the nucleic acid. Preferably, an “isolated” nucleic acid is free of sequences which naturally flank the nucleic acid (i.e., sequences located at the 5′- and 3′-termini of the nucleic acid) in the genomic DNA of the organism from which the nucleic acid is derived. For example, in various embodiments, the isolated NOVX nucleic acid molecules can contain less than about 5 kb, 4 kb, 3 kb, 2 kb, 1 kb, 0.5 kb or 0.1 kb of nucleotide sequences which naturally flank the nucleic acid molecule in genomic DNA of the cell/tissue from which the nucleic acid is derived (e.g., brain, heart, liver, spleen, etc.). Moreover, an “isolated” nucleic acid molecule, such as a cDNA molecule, can be substantially free of other cellular material, or culture medium, or of chemical precursors or other chemicals.

[0054] A nucleic acid molecule of the invention, e.g., a nucleic acid molecule having the nucleotide sequence of SEQ ID NO:2n-1, wherein n is an integer between 1 and 71, or a complement of this nucleotide sequence, can be isolated using standard molecular biology techniques and the sequence information provided herein. Using all or a portion of the nucleic acid sequence of SEQ ID NO:2n-1, wherein n is an integer between 1 and 71, as a hybridization probe, NOVX molecules can be isolated using standard hybridization and cloning techniques (e.g., as described in Sambrook, et al., (eds.), MOLECULAR CLONING: A LABORATORY MANUAL 2^{nd} Ed., Cold Spring Harbor Laboratory Press, Cold Spring Harbor, N.Y., 1989; and Ausubel, et al., (eds.), CURRENT PROTOCOLS IN MOLECULAR BIOLOGY, John Wiley & Sons, New York, N.Y., 1993.)

[0055] A nucleic acid of the invention can be amplified using cDNA, mRNA or alternatively, genomic DNA, as a template with appropriate oligonucleotide primers according to standard PCR amplification techniques. The nucleic acid so amplified can be cloned into an appropriate vector and characterized by DNA sequence analysis. Furthermore, oligonucleotides corresponding to NOVX nucleotide sequences can be prepared by standard synthetic techniques, e.g., using an automated DNA synthesizer.

[0056] As used herein, the term “oligonucleotide” refers to a series of linked nucleotide residues. A short oligonucleotide sequence may be based on, or designed from, a genomic or cDNA sequence and is used to amplify, confirm, or reveal the presence of an identical, similar or complementary DNA or RNA in a particular cell or tissue. Oligonucleotides comprise a nucleic acid sequence having about 10 nt, 50 nt, or 100 nt in length, preferably about 15 nt to 30 nt in length. In one embodiment of the invention, an oligonucleotide comprising a nucleic acid molecule less than 100 nt in length would further comprise at least 6 contiguous nucleotides of SEQ ID NO:2n-1, wherein n is an integer between 1 and 71, or a complement thereof. Oligonucleotides may be chemically synthesized and may also be used as probes.

[0057] In another embodiment, an isolated nucleic acid molecule of the invention comprises a nucleic acid molecule that is a complement of the nucleotide sequence shown in SEQ ID NO:2n-1, wherein n is an integer between 1 and 71, or a portion of this nucleotide sequence (e.g., a fragment that can be used as a probe or primer or a fragment encoding a biologically-active portion of a NOVX polypeptide). A nucleic acid molecule that is complementary to the nucleotide sequence of SEQ ID NO:2n-1, wherein n is an integer between 1 and 71, is one that is sufficiently complementary to the nucleotide sequence of SEQ ID NO:2n-1, wherein n is an integer between 1 and 71, that it can hydrogen bond with few or no mismatches to the nucleotide sequence shown in SEQ ID NO:2n-1, wherein n is an integer between 1 and 71, thereby forming a stable duplex.

[0058] As used herein, the term “complementary” refers to Watson-Crick or Hoogsteen base pairing between nucleotides units of a nucleic acid molecule, and the term “binding” means the physical or chemical interaction between two polypeptides or compounds or associated polypeptides or compounds or combinations thereof. Binding includes ionic, non-ionic, van der Waals, hydrophobic interactions, and the like. A physical interaction can be either direct or indirect. Indirect interactions may be through or due to the effects of another polypeptide or compound. Direct binding refers to interactions that do not take place through, or due to, the effect of another polypeptide or compound, but instead are without other substantial chemical intermediates.

[0059] A “fragment” provided herein is defined as a sequence of at least 6 (contiguous) nucleic acids or at least 4 (contiguous) amino acids, a length sufficient to allow for specific hybridization in the case of nucleic acids or for specific recognition of an epitope in the case of amino acids, and is at most some portion less than a full length sequence. Fragments may be derived from any contiguous portion of a nucleic acid or amino acid sequence of choice.

[0060] A full-length NOVX clone is identified as containing an ATG translation start codon and an in-frame stop codon. Any disclosed NOVX nucleotide sequence lacking an ATG start codon therefore encodes a truncated C-terminal fragment of the respective NOVX polypeptide, and requires that the corresponding full-length cDNA extend in the 5′ direction of the disclosed sequence. Any disclosed NOVX nucleotide sequence lacking an in-frame stop codon similarly encodes a truncated N-terminal fragment of the respective NOVX polypeptide, and requires that the corresponding full-length cDNA extend in the 3′ direction of the disclosed sequence.

[0061] A “derivative” is a nucleic acid sequence or amino acid sequence formed from the native compounds either directly, by modification or partial substitution. An “analog” is a nucleic acid sequence or amino acid sequence that has a structure similar to, but not identical to, the native compound, e.g. they differs from it in respect to certain components or side chains. Analogs may be synthetic or derived from a different evolutionary origin and may have a similar or opposite metabolic activity compared to wild type. A “homolog” is a nucleic acid sequence or amino acid sequence of a particular gene that is derived from different species.

[0062] Derivatives and analogs may be full length or other than full length. Derivatives or analogs of the nucleic acids or proteins of the invention include, but are not limited to, molecules comprising regions that are substantially homologous to the nucleic acids or proteins of the invention, in various embodiments, by at least about 70%, 80%, or 95%, or more identity, with a preferred identity of 80-95%, and most preferred identity of 98-99% or more, over a nucleic acid or amino acid sequence of identical size or when compared to an aligned sequence in which the alignment is done by a computer homology program known in the art, or whose encoding nucleic acid is capable of hybridizing to the complement of a sequence encoding the proteins under stringent, moderately stringent, or low stringent conditions. See e.g. Ausubel, et al., CURRENT PROTOCOLS IN MOLECULAR BIOLOGY, John Wiley & Sons, New York, N.Y., 1993, and below.

[0063] A “homologous nucleic acid sequence” or “homologous amino acid sequence,” or variations thereof, refer to sequences characterized by a homology at the nucleotide level or amino acid level as discussed above. Homologous nucleotide sequences include those sequences coding for isoforms of NOVX polypeptides. Isoforms can be expressed in different tissues of the same organism as a result of, for example, alternative splicing of RNA. Alternatively, isoforms can be encoded by different genes. In the invention, homologous nucleotide sequences include nucleotide sequences encoding for a NOVX polypeptide of species other than humans, including, but not limited to: vertebrates, and thus can include, e.g., frog, mouse, rat, rabbit, dog, cat cow, horse, and other organisms. Homologous nucleotide sequences also include, but are not limited to, naturally occurring allelic variations and mutations of the nucleotide sequences set forth herein. A homologous nucleotide sequence does not, however, include the exact nucleotide sequence encoding human NOVX protein. Homologous nucleic acid sequences include those nucleic acid sequences that encode conservative amino acid substitutions (see below) in SEQ ID NO:2n-1, wherein n is an integer between 1 and 71, as well as a polypeptide possessing NOVX biological activity. Various biological activities of the NOVX proteins are described below.

[0064] A NOVX polypeptide is encoded by the open reading frame (“ORF”) of a NOVX nucleic acid. An ORF corresponds to a nucleotide sequence that could potentially be translated into a polypeptide. A stretch of nucleic acids comprising an ORF is uninterrupted by a stop codon. An ORF that represents the coding sequence for a full protein begins with an ATG “start” codon and terminates with one of the three “stop” codons, namely, TM, TAG, or TGA. For the purposes of this invention, an ORF may be any part of a coding sequence, with or without a start codon, a stop codon, or both. For an ORF to be considered as a good candidate for coding for a bona fide cellular protein, a minimum size requirement is often set, e.g., a stretch of DNA that would encode a protein of 50 amino acids or more.

[0065] The nucleotide sequences determined from the cloning of the human NOVX genes allows for the generation of probes and primers designed for use in identifying and/or cloning NOVX homologues in other cell types, e.g. from other tissues, as well as NOVX homologues from other vertebrates. The probe/primer typically comprises substantially purified oligonucleotide. The oligonucleotide typically comprises a region of nucleotide sequence that hybridizes under stringent conditions to at least about 12, 25, 50, 100, 150, 200, 250, 300, 350 or 400 consecutive sense strand nucleotide sequence of SEQ ID NO:2n-1, wherein n is an integer between 1 and 71; or an anti-sense strand nucleotide sequence of SEQ ID NO:2n-1, wherein n is an integer between 1 and 71; or of a naturally occurring mutant of SEQ ID NO:2n-1, wherein n is an integer between 1 and 71.

[0066] Probes based on the human NOVX nucleotide sequences can be used to detect transcripts or genomic sequences encoding the same or homologous proteins. In various embodiments, the probe has a detectable label attached, e.g. the label can be a radioisotope, a fluorescent compound, an enzyme, or an enzyme co-factor. Such probes can be used as a part of a diagnostic test kit for identifying cells or tissues which mis-express a NOVX protein, such as by measuring a level of a NOVX-encoding nucleic acid in a sample of cells from a subject e.g., detecting NOVX mRNA levels or determining whether a genomic NOVX gene is up or down regulated or has been mutated or deleted.

[0067] “A polypeptide having a biologically-active portion of a NOVX polypeptide” refers to polypeptides exhibiting activity similar, but not necessarily identical to, an activity of a polypeptide of the invention, including mature forms, as measured in a particular biological assay, with or without dose dependency. A nucleic acid fragment encoding a “biologically-active portion of NOVX” can be prepared by isolating a portion of SEQ ID NO:2n-1, wherein n is an integer between 1 and 71, that encodes a polypeptide having a NOVX biological activity (the biological activities of the NOVX proteins are described below), expressing the encoded portion of NOVX protein (e.g., by recombinant expression in vitro) and assessing the activity of the encoded portion of NOVX.

[0068] NOVX Single Nucleotide Polymorphisms

[0069] Variant sequences are also included in this application. A variant sequence can include a single nucleotide polymorphism (SNP). A SNP can, in some instances, be referred to as a “cSNP” to denote that the nucleotide sequence containing the SNP originates as a cDNA. SNPs occurring within genes may result in an alteration of the amino acid encoded by the gene at the position of the SNP. Preferred embodiments include NOV1b, NOV1c, NOV1d, NOV1e, NOV1f, NOV1g, NOV1h, NOV1i, NOV1j, NOV1k, NOV1l, NOV1m, NOV1n, NOV1o, NOV1p, NOV1q, NOV1r, NOV1s, NOV1t, NOV6c, NOV6d, NOV6e, NOV6f, NOV6g, NOV6h, NOV6i, NOV6j, NOV6k, NOV6l, NOV8b, NOV8c, NOV8d, NOV8e, NOV8f, and NOV9h.

[0070] NOVX Nucleic Acid and Polypeptide Variants

[0071] The invention further encompasses nucleic acid molecules that differ from the nucleotide sequences of SEQ ID NO:2n-1, wherein n is an integer between 1 and 71, due to degeneracy of the genetic code and thus encode the same NOVX proteins as that encoded by the nucleotide sequences of SEQ ID NO:2n-1, wherein n is an integer between 1 and 71. In another embodiment, an isolated nucleic acid molecule of the invention has a nucleotide sequence encoding a protein having an amino acid sequence of SEQ ID NO:2n, wherein n is an integer between 1 and 71 or is 94.

[0072] In addition to the human NOVX nucleotide sequences of SEQ ID NO:2n-1, wherein n is an integer between 1 and 71, it will be appreciated by those skilled in the art that DNA sequence polymorphisms that lead to changes in the amino acid sequences of the NOVX polypeptides may exist within a population (e.g., the human population). Such genetic polymorphism in the NOVX genes may exist among individuals within a population due to natural allelic variation. As used herein, the terms “gene” and “recombinant gene” refer to nucleic acid molecules comprising an open reading frame (ORF) encoding a NOVX protein, preferably a vertebrate NOVX protein. Such natural allelic variations can typically result in 1-5% variance in the nucleotide sequence of the NOVX genes. Any and all such nucleotide variations and resulting amino acid polymorphisms in the NOVX polypeptides, which are the result of natural allelic variation and that do not alter the functional activity of the NOVX polypeptides, are intended to be within the scope of the invention.

[0073] Moreover, nucleic acid molecules encoding NOVX proteins from other species, and thus that have a nucleotide sequence that differs from a human SEQ ID NO:2n-1, wherein n is an integer between 1 and 71, are intended to be within the scope of the invention. Nucleic acid molecules corresponding to natural allelic variants and homologues of the NOVX cDNAs of the invention can be isolated based on their homology to the human NOVX nucleic acids disclosed herein using the human cDNAs, or a portion thereof, as a hybridization probe according to standard hybridization techniques under stringent hybridization conditions.

[0074] Accordingly, in another embodiment, an isolated nucleic acid molecule of the invention is at least 6 nucleotides in length and hybridizes under stringent conditions to the nucleic acid molecule comprising the nucleotide sequence of SEQ ID NO:2n-1, wherein n is an integer between 1 and 71. In another embodiment, the nucleic acid is at least 10, 25, 50, 100, 250, 500, 750, 1000, 1500, or 2000 or more nucleotides in length. In yet another embodiment, an isolated nucleic acid molecule of the invention hybridizes to the coding region. Homologs (i.e., nucleic acids encoding NOVX proteins derived from species other than human) or other related sequences (e.g., paralogs) can be obtained by low, moderate or high stringency hybridization with all or a portion of the particular human sequence as a probe using methods well known in the art for nucleic acid hybridization and cloning.

[0075] As used herein, the phrase “stringent hybridization conditions” refers to conditions under which a probe, primer or oligonucleotide will hybridize to its target sequence, but to no other sequences. Stringent conditions are sequence-dependent and will be different in different circumstances. Longer sequences hybridize specifically at higher temperatures than shorter sequences. Generally, stringent conditions are selected to be about 5° C. lower than the thermal melting point (Tm) for the specific sequence at a defined ionic strength and pH. The Tm is the temperature (under defined ionic strength, pH and nucleic acid concentration) at which 50% of the probes complementary to the target sequence hybridize to the target sequence at equilibrium. Since the target sequences are generally present at excess, at Tm, 50% of the probes are occupied at equilibrium. Typically, stringent conditions will be those in which the salt concentration is less than about 1.0 M sodium ion, typically about 0.01 to 1.0 M sodium ion (or other salts) at pH 7.0 to 8.3 and the temperature is at least about 30° C. for short probes, primers or oligonucleotides (e.g., 10 nt to 50 nt) and at least about 60° C. for longer probes, primers and oligonucleotides. Stringent conditions may also be achieved with the addition of destabilizing agents, such as formamide.

[0076] Stringent conditions are known to those skilled in the art and can be found in Ausubel, et al., (eds.), CURRENT PROTOCOLS IN MOLECULAR BIOLOGY, John Wiley & Sons, N.Y. (1989), 6.3.1-6.3.6. Preferably, the conditions are such that sequences at least about 65%, 70%, 75%, 85%, 90%, 95%, 98%, or 99% homologous to each other typically remain hybridized to each other. A non-limiting example of stringent hybridization conditions are hybridization in a high salt buffer comprising 6×SSC, 50 mM Tris-HCl (pH 7.5), 1 mM EDTA, 0.02% PVP, 0.02% Ficoll, 0.02% BSA, and 500 mg/ml denatured salmon sperm DNA at 65° C., followed by one or more washes in 0.2×SSC, 0.01% BSA at 50C. An isolated nucleic acid molecule of the invention that hybridizes under stringent conditions to a sequence of SEQ ID NO:2n-1, wherein n is an integer between 1 and 71, corresponds to a naturally-occurring nucleic acid molecule. As used herein, a “naturally-occurring” nucleic acid molecule refers to an RNA or DNA molecule having a nucleotide sequence that occurs in nature (e.g., encodes a natural protein).

[0077] In a second embodiment, a nucleic acid sequence that is hybridizable to the nucleic acid molecule comprising the nucleotide sequence of SEQ ID NO:2n-1, wherein n is an integer between 1 and 71, or fragments, analogs or derivatives thereof, under conditions of moderate stringency is provided. A non-limiting example of moderate stringency hybridization conditions are hybridization in 6×SSC, 5×Reinhardt's solution, 0.5% SDS and 100 mg/ml denatured salmon sperm DNA at 55° C., followed by one or more washes in 1×SSC, 0.1% SDS at 37° C. Other conditions of moderate stringency that may be used are well-known within the art. See, e.g., Ausubel, et al. (eds.), 1993, CURRENT PROTOCOLS IN MOLECULAR BIOLOGY, John Wiley & Sons, NY, and Krieger, 1990; GENE TRANSFER AND EXPRESSION, A LABORATORY MANUAL, Stockton Press, NY.

[0078] In a third embodiment, a nucleic acid that is hybridizable to the nucleic acid molecule comprising the nucleotide sequences of SEQ ID NO:2n-1, wherein n is an integer between 1 and 71, or fragments, analogs or derivatives thereof, under conditions of low stringency, is provided. A non-limiting example of low stringency hybridization conditions are hybridization in 35% formamide, 5×SSC, 50 mM Tris-HCl (pH 7.5), 5 mM EDTA, 0.02% PVP, 0.02% Ficoll, 0.2% BSA, 100 mg/ml denatured salmon sperm DNA, 10% (wt/vol) dextran sulfate at 40° C., followed by one or more washes in 2×SSC, 25 mM Tris-HCl (pH 7.4), 5 mM EDTA, and 0.1% SDS at 50° C. Other conditions of low stringency that may be used are well known in the art (e.g., as employed for cross-species hybridizations). See, e.g., Ausubel, et al. (eds.), 1993, CURRENT PROTOCOLS IN MOLECULAR BIOLOGY, John Wiley & Sons, NY, and Kriegler, 1990, GENE TRANSFER AND EXPRESSION, A LABORATORY MANUAL, Stockton Press, NY; Proc Natl Acad Sci USA 78: 6789-6792 (1981).

[0079] Conservative Mutations

[0080] In addition to naturally-occurring allelic variants of NOVX sequences that may exist in the population, the skilled artisan will further appreciate that changes can be introduced by mutation into the nucleotide sequences of SEQ ID NO:2n-1, wherein n is an integer between 1 and 71, thereby leading to changes in the amino acid sequences of the encoded NOVX protein, without altering the functional ability of that NOVX protein. For example, nucleotide substitutions leading to amino acid substitutions at “non-essential” amino acid residues can be made in the sequence of SEQ ID NO:2n, wherein n is an integer between 1 and 71 or is 94. A “non-essential” amino acid residue is a residue that can be altered from the wild-type sequences of the NOVX proteins without altering their biological activity, whereas an “essential” amino acid residue is required for such biological activity. For example, amino acid residues that are conserved among the NOVX proteins of the invention are predicted to be particularly non-amenable to alteration. Amino acids for which conservative substitutions can be made are well-known within the art.

[0081] Another aspect of the invention pertains to nucleic acid molecules encoding NOVX proteins that contain changes in amino acid residues that are not essential for activity. Such NOVX proteins differ in amino acid sequence from SEQ ID NO:2n-1, wherein n is an integer between 1 and 71, yet retain biological activity. In one embodiment, the isolated nucleic acid molecule comprises a nucleotide sequence encoding a protein, wherein the protein comprises an amino acid sequence at least about 80% homologous to SEQ ID NO:2n, wherein n is an integer between 1 and 71 or is 94; more preferably at least about 90% homologous, even more preferably at least about 95% homologous, most preferably 98-99% homologous to SEQ ID NO:2n, wherein n is an integer between 1 and 71 or is 94.

[0082] An isolated nucleic acid molecule encoding a NOVX protein homologous to the protein of SEQ ID NO:2n, wherein n is an integer between 1 and 71 or is 94, can be created by introducing one or more nucleotide substitutions, additions or deletions into the nucleotide sequence of SEQ ID NO:2n-1, wherein n is an integer between 1 and 71, such that one or more amino acid substitutions, additions or deletions are introduced into the encoded protein.

[0083] Mutations can be introduced any one of SEQ ID NO:2n-1, wherein n is an integer between 1 and 71, by standard techniques, such as site-directed mutagenesis and PCR-mediated mutagenesis. Preferably, conservative amino acid substitutions are made at one or more predicted, non-essential amino acid residues. A “conservative amino acid substitution” is one in which the amino acid residue is replaced with an amino acid residue having a similar side chain. Families of amino acid residues having similar side chains have been defined within the art. These families include amino acids with basic side chains (e.g., lysine, arginine, histidine), acidic side chains (e.g., aspartic acid, glutamic acid), uncharged polar side chains (e.g., glycine, asparagine, glutamine, serine, threonine, tyrosine, cysteine), nonpolar side chains (e.g., alanine, valine, leucine, isoleucine, proline, phenylalanine, methionine, tryptophan), beta-branched side chains (e.g., threonine, valine, isoleucine) and aromatic side chains (e.g., tyrosine, phenylalanine, tryptophan, histidine). Thus, a predicted non-essential amino acid residue in the NOVX protein is replaced with another amino acid residue from the same side chain family. Alternatively, in another embodiment, mutations can be introduced randomly along all or part of a NOVX coding sequence, such as by saturation mutagenesis, and the resultant mutants can be screened for NOVX biological activity to identify mutants that retain activity. Following mutagenesis of a nucleic acid of SEQ ID NO:2n-1, wherein n is an integer between 1 and 71, the encoded protein can be expressed by any recombinant technology known in the art and the activity of the protein can be determined.

[0084] The relatedness of amino acid families may also be determined based on side chain interactions. Substituted amino acids may be fully conserved “strong” residues or fully conserved “weak” residues. The “strong” group of conserved amino acid residues may be any one of the following groups: STA, NEQK, NHQK, NDEQ, QHRK, MILV, MILF, HY, FYW, wherein the single letter amino acid codes are grouped by those amino acids that may be substituted for each other. Likewise, the “weak” group of conserved residues may be any one of the following: CSA, ATV, SAG, STNK, STPA, SGND, SNDEQK, NDEQHK, NEQHRK, HFY, wherein the letters within each group represent the single letter amino acid code.

[0085] In one embodiment, a mutant NOVX protein can be assayed for (i) the ability to form protein:protein interactions with other NOVX proteins, other cell-surface proteins, or biologically-active portions thereof, (ii) complex formation between a mutant NOVX protein and a NOVX ligand; or (iii) the ability of a mutant NOVX protein to bind to an intracellular target protein or biologically-active portion thereof; (e.g. avidin proteins).

[0086] In yet another embodiment, a mutant NOVX protein can be assayed for the ability to regulate a specific biological function (e.g., regulation of insulin release).

[0087] Interfering RNA

[0088] In one aspect of the invention, NOVX gene expression can be attenuated by RNA interference. One approach well-known in the art is short interfering RNA (siRNA) mediated gene silencing where expression products of a NOVX gene are targeted by specific double stranded NOVX derived siRNA nucleotide sequences that are complementary to at least a 19-25 nt long segment of the NOVX gene transcript, including the 5′ untranslated (UT) region, the ORF, or the 3′ UT region. See, e.g., PCT applications WO00/44895, WO99/32619, WO01/75164, WO01/92513, WO 01/29058, WO01/89304, WO02/16620, and WO02/29858, each incorporated by reference herein in their entirety. Targeted genes can be a NOVX gene, or an upstream or downstream modulator of the NOVX gene. Nonlimiting examples of upstream or downstream modulators of a NOVX gene include, e.g., a transcription factor that binds the NOVX gene promoter, a kinase or phosphatase that interacts with a NOVX polypeptide, and polypeptides involved in a NOVX regulatory pathway.

[0089] An inventive therapeutic method of the invention contemplates administering a NOVX siRNA construct as therapy to compensate for increased or aberrant NOVX expression or activity. The NOVX ribopolynucleotide is obtained and processed into siRNA fragments, or a NOVX siRNA is synthesized, as described above. The NOVX siRNA is administered to cells or tissues using known nucleic acid transfection techniques, as described above. A NOVX siRNA specific for a NOVX gene will decrease or knockdown NOVX transcription products, which will lead to reduced NOVX polypeptide production, resulting in reduced NOVX polypeptide activity in the cells or tissues.

[0090] The present invention also encompasses a method of treating a disease or condition associated with the presence of a NOVX protein in an individual comprising administering to the individual an RNAi construct that targets the mRNA of the protein (the mRNA that encodes the protein) for degradation. A specific RNAi construct includes a siRNA or a double stranded gene transcript that is processed into siRNAs. Upon treatment, the target protein is not produced or is not produced to the extent it would be in the absence of the treatment.

[0091] In specific embodiments, a NOVX siRNA is used in therapy. Methods for the generation and use of a NOVX siRNA are known to those skilled in the art. Example techniques are provided below.

[0092] Production of RNAs

[0093] Sense RNA (ssRNA) and antisense RNA (asRNA) of NOVX are produced using known methods such as transcription in RNA expression vectors. In the initial experiments, the sense and antisense RNA are about 500 bases in length each. The produced ssRNA and asRNA (0.5 □M) in 10 mM Tris-HCl (pH 7.5) with 20 mM NaCl were heated to 95° C. for 1 min then cooled and annealed at room temperature for 12 to 16 h. The RNAs are precipitated and resuspended in lysis buffer (below). To monitor annealing, RNAs are electrophoresed in a 2% agarose gel in TBE buffer and stained with ethidium bromide. See, e.g., Sambrook et al., Molecular Cloning. Cold Spring Harbor Laboratory Press, Plainview, N.Y. (1989).

[0094] Lysate Preparation

[0095] Untreated rabbit reticulocyte lysate (Ambion) are assembled according to the manufacturer's directions. dsRNA is incubated in the lysate at 30° C. for 10 min prior to the addition of mRNAs. Then NOVX mRNAs are added and the incubation continued for an additional 60 min. The molar ratio of double stranded RNA and mRNA is about 200:1. The NOVX mRNA is radiolabeled (using known techniques) and its stability is monitored by gel electrophoresis.

[0096] In a parallel experiment made with the same conditions, the double stranded RNA is internally radiolabeled with a ³²P-ATP. Reactions are stopped by the addition of 2× proteinase K buffer and deproteinized as described previously (Genes Dev., 13:3191-3197, 1999). Products are analyzed by electrophoresis in 15% or 18% polyacrylamide sequencing gels using appropriate RNA standards. By monitoring the gels for radioactivity, the natural production of 10 to 25 nt RNAs from the double stranded RNA can be determined.

[0097] The band of double stranded RNA, about 21-23 bps, is eluded. The efficacy of these 21-23 mers for suppressing NOVX transcription is assayed in vitro using the same rabbit reticulocyte assay described above using 50 nanomolar of double stranded 21-23 mer for each assay. The sequence of these 21-23 mers is then determined using standard nucleic acid sequencing techniques.

[0098] RNA Preparation

[0099] 21 nt RNAs, based on the sequence determined above, are chemically synthesized using Expedite RNA phosphoramidites and thymidine phosphoramidite (Proligo, Germany). Synthetic oligonucleotides are deprotected and gel-purified (Genes & Dev. 15, 188-200, 2001), followed by Sep-Pak C18 cartridge (Waters, Milford, Mass., USA) purification (Biochemistry, 32:11658-11668 1993).

[0100] These RNAs (20 μM) single strands are incubated in annealing buffer (100 mM potassium acetate, 30 mM HEPES-KOH at pH 7.4, 2 mM magnesium acetate) for 1 min at 90° C. followed by 1 h at 37° C.

[0101] Cell Culture

[0102] A cell culture known in the art to regularly express NOVX is propagated using standard conditions. 24 hours before transfection, at approx. 80% confluency, the cells are trypsinized and diluted 1:5 with fresh medium without antibiotics (1-3×105 cells/ml) and transferred to 24-well plates (500 ml/well). Transfection is performed using a commercially available lipofection kit and NOVX expression is monitored using standard techniques with positive and negative control. A positive control is cells that naturally express NOVX while a negative control is cells that do not express NOVX. Base-paired 21 and 22 nt siRNAs with overhanging 3′ ends mediate efficient sequence-specific mRNA degradation in lysates and in cell culture. Different concentrations of siRNAs are used. An efficient concentration for suppression in vitro in mammalian culture is between 25 nM to 100 nM final concentration. This indicates that siRNAs are effective at concentrations that are several orders of magnitude below the concentrations applied in conventional antisense or ribozyme gene targeting experiments.

[0103] The above method provides a way both for the deduction of NOVX siRNA sequence and the use of such siRNA for in vitro suppression. In vivo suppression may be performed using the same siRNA using well known in vivo transfection or gene therapy transfection techniques.

[0104] Antisense Nucleic Acids

[0105] Another aspect of the invention pertains to isolated antisense nucleic acid molecules that are hybridizable to or complementary to the nucleic acid molecule comprising the nucleotide sequence of SEQ ID NO:2n-1, wherein n is an integer between 1 and 71, or fragments, analogs or derivatives thereof. An “antisense” nucleic acid comprises a nucleotide sequence that is complementary to a “sense” nucleic acid encoding a protein (e.g., complementary to the coding strand of a double-stranded cDNA molecule or complementary to an mRNA sequence). In specific aspects, antisense nucleic acid molecules are provided that comprise a sequence complementary to at least about 10, 25, 50, 100, 250 or 500 nucleotides or an entire NOVX coding strand, or to only a portion thereof. Nucleic acid molecules encoding fragments, homologs, derivatives and analogs of a NOVX protein of SEQ ID NO:2n, wherein n is an integer between 1 and 71 or is 94, or antisense nucleic acids complementary to a NOVX nucleic acid sequence of SEQ ID NO:2n-1, wherein n is an integer between 1 and 71, are additionally provided.

[0106] In one embodiment, an antisense nucleic acid molecule is antisense to a “coding region” of the coding strand of a nucleotide sequence encoding a NOVX protein. The term “coding region” refers to the region of the nucleotide sequence comprising codons which are translated into amino acid residues. In another embodiment, the antisense nucleic acid molecule is antisense to a “noncoding region” of the coding strand of a nucleotide sequence encoding the NOVX protein. The term “noncoding region” refers to 5′ and 3′ sequences which flank the coding region that are not translated into amino acids (i.e., also referred to as 5′ and 3′ untranslated regions).

[0107] Given the coding strand sequences encoding the NOVX protein disclosed herein, antisense nucleic acids of the invention can be designed according to the rules of Watson and Crick or Hoogsteen base pairing. The antisense nucleic acid molecule can be complementary to the entire coding region of NOVX mRNA, but more preferably is an oligonucleotide that is antisense to only a portion of the coding or noncoding region of NOVX mRNA. For example, the antisense oligonucleotide can be complementary to the region surrounding the translation start site of NOVX mRNA. An antisense oligonucleotide can be, for example, about 5, 10, 15, 20, 25, 30, 35, 40, 45 or 50 nucleotides in length. An antisense nucleic acid of the invention can be constructed using chemical synthesis or enzymatic ligation reactions using procedures known in the art. For example, an antisense nucleic acid (e.g., an antisense oligonucleotide) can be chemically synthesized using naturally-occurring nucleotides or variously modified nucleotides designed to increase the biological stability of the molecules or to increase the physical stability of the duplex formed between the antisense and sense nucleic acids (e.g., phosphorothioate derivatives and acridine substituted nucleotides can be used).

[0108] Examples of modified nucleotides that can be used to generate the antisense nucleic acid include: 5-fluorouracil, 5-bromouracil, 5-chlorouracil, 5-iodouracil, hypoxanthine, xanthine, 4-acetylcytosine, 5-carboxymethylaminomethyl-2-thiouridine, 5-(carboxyhydroxylmethyl) uracil, 5-carboxymethylaminomethyluracil, dihydrouracil, beta-D-galactosylqueosine, inosine, N6-isopentenyladenine, 1-methylguanine, 1-methylinosine, 2,2-dimethylguanine, 2-methyladenine, 2-methylguanine, 5-methoxyuracil, 3-methylcytosine, 5-methylcytosine, N6-adenine, 7-methylguanine, 5-methylaminomethyluracil, 5-methoxyaminomethyl-2-thiouracil, 2-thiouracil, 4-thiouracil, beta-D-mannosylqueosine, 5′-methoxycarboxymethyluracil, 2-methylthio-N-6-isopentenyladenine, uracil-5-oxyacetic acid (v), wybutoxosine, pseudouracil, queosine, 2-thiocytosine, 5-methyl-2-thiouracil, 5-methyluracil, uracil-5-oxyacetic acid methylester, uracil-5-oxyacetic acid (v), 5-methyl-2-thiouracil, 3-(3-amino-3-N-2-carboxypropyl) uracil, (acp3)w, and 2,6-diaminopurine. Alternatively, the antisense nucleic acid can be produced biologically using an expression vector into which a nucleic acid has been subcloned in an antisense orientation (i.e., RNA transcribed from the inserted nucleic acid will be of an antisense orientation to a target nucleic acid of interest, described further in the following subsection).

[0109] The antisense nucleic acid molecules of the invention are typically administered to a subject or generated in situ such that they hybridize with or bind to cellular mRNA and/or genomic DNA encoding a NOVX protein to thereby inhibit expression of the protein (e.g., by inhibiting transcription and/or translation). The hybridization can be by conventional nucleotide complementarity to form a stable duplex, or, for example, in the case of an antisense nucleic acid molecule that binds to DNA duplexes, through specific interactions in the major groove of the double helix. An example of a route of administration of antisense nucleic acid molecules of the invention includes direct injection at a tissue site. Alternatively, antisense nucleic acid molecules can be modified to target selected cells and then administered systemically. For example, for systemic administration, antisense molecules can be modified such that they specifically bind to receptors or antigens expressed on a selected cell surface (e.g., by linking the antisense nucleic acid molecules to peptides or antibodies that bind to cell surface receptors or antigens). The antisense nucleic acid molecules can also be delivered to cells using the vectors described herein. To achieve sufficient nucleic acid molecules, vector constructs in which the antisense nucleic acid molecule is placed under the control of a strong pol II or pol III promoter are preferred.

[0110] In yet another embodiment, the antisense nucleic acid molecule of the invention is an □-anomeric nucleic acid molecule. An α-anomeric nucleic acid molecule forms specific double-stranded hybrids with complementary RNA in which, contrary to the usual β-units, the strands run parallel to each other. See, e.g., Nucl. Acids Res. 15: 6625-6641 (1987). The antisense nucleic acid molecule can also comprise a 2′-o-methylribonucleotide (See, e.g., Nucl. Acids Res. 15: 6131-6148, 1987) or a chimeric RNA-DNA analogue (See, e.g., FEBS Lett. 215: 327-330, 1987).

[0111] Ribozymes and PNA Moieties

[0112] Nucleic acid modifications include, by way of non-limiting example, modified bases, and nucleic acids whose sugar phosphate backbones are modified or derivatized. These modifications are carried out at least in part to enhance the chemical stability of the modified nucleic acid, such that they may be used, for example, as antisense binding nucleic acids in therapeutic applications in a subject.

[0113] In one embodiment, an antisense nucleic acid of the invention is a ribozyme. Ribozymes are catalytic RNA molecules with ribonuclease activity that are capable of cleaving a single-stranded nucleic acid, such as an mRNA, to which they have a complementary region. Thus, ribozymes (e.g., hammerhead ribozymes as described in Nature 334: 585-591,1988) can be used to catalytically cleave NOVX mRNA transcripts to thereby inhibit translation of NOVX mRNA. A ribozyme having specificity for a NOVX-encoding nucleic acid can be designed based upon the nucleotide sequence of a NOVX cDNA disclosed herein (i.e., SEQ ID NO:2n-1, wherein n is an integer between 1 and 71). For example, a derivative of a Tetrahymena L-19 IVS RNA can be constructed in which the nucleotide sequence of the active site is complementary to the nucleotide sequence to be cleaved in a NOVX-encoding mRNA. See, e.g., U.S. Pat. No. 4,987,071; U.S. Pat. No. 5,116,742. NOVX mRNA can also be used to select a catalytic RNA having a specific ribonuclease activity from a pool of RNA molecules. See, e.g., Science 261:1411-1418 (1993).

[0114] Alternatively, NOVX gene expression can be inhibited by targeting nucleotide sequences complementary to the regulatory region of the NOVX nucleic acid (e.g., the NOVX promoter and/or enhancers) to form triple helical structures that prevent transcription of the NOVX gene in target cells. See, e.g., Anticancer Drug Des. 6: 569-84,1991; Ann. N.Y. Acad. Sci. 660: 27-36,1992; Bioassays 14: 807-15,1992.

[0115] In various embodiments, the NOVX nucleic acids can be modified at the base moiety, sugar moiety or phosphate backbone to improve, e.g., the stability, hybridization, or solubility of the molecule. For example, the deoxyribose phosphate backbone of the nucleic acids can be modified to generate peptide nucleic acids. See, e.g., Bioorg Med Chem 4: 5-23,1996. As used herein, the terms “peptide nucleic acids” or “PNAs” refer to nucleic acid mimics (e.g., DNA mimics) in which the deoxyribose phosphate backbone is replaced by a pseudopeptide backbone and only the four natural nucleotide bases are retained. The neutral backbone of PNAs has been shown to allow for specific hybridization to DNA and RNA under conditions of low ionic strength. The synthesis of PNA oligomer can be performed using standard solid phase peptide synthesis protocols as described in Bioorg Med Chem 4: 5-23,1996; Proc. Natl. Acad. Sci. USA 93: 14670-14675, 1996.

[0116] PNAs of NOVX can be used in therapeutic and diagnostic applications. For example, PNAs can be used as antisense or antigene agents for sequence-specific modulation of gene expression by, e.g., inducing transcription or translation arrest or inhibiting replication. PNAs of NOVX can also be used, for example, in the analysis of single base pair mutations in a gene (e.g., PNA directed PCR clamping; as artificial restriction enzymes when used in combination with other enzymes, e.g., S₁ nucleases (See, Bioorg Med Chem 4: 5-23,1996); or as probes or primers for DNA sequence and hybridization (See, Bioorg Med Chem 4: 5-23,1996; Proc. Natl. Acad. Sci. USA 93: 14670-14675,1996).

[0117] In other embodiments, the oligonucleotide may include other appended groups such as peptides (e.g., for targeting host cell receptors in vivo), or agents facilitating transport across the cell membrane (see, e.g., Proc. Natl. Acad. Sci. U.S.A. 86: 6553-6556,1989; Proc. Natl. Acad. Sci. 84: 648-652,1987; PCT Publication No. WO88/09810) or the blood-brain barrier (see, e.g., PCT Publication No. WO 89/10134). In addition, oligonucleotides can be modified with hybridization triggered cleavage agents (see, e.g., BioTechniques 6:958-976,1988) or intercalating agents (see, e.g., Pharm. Res. 5: 539-549,1988). To this end, the oligonucleotide may be conjugated to another molecule, e.g., a peptide, a hybridization triggered cross-linking agent, a transport agent, a hybridization-triggered cleavage agent, and the like.

[0118] NOVX Polypeptides

[0119] A polypeptide according to the invention includes a polypeptide of the amino acid sequence of NOVX polypeptides whose sequences are provided in any one of SEQ ID NO:2n, wherein n is an integer between 1 and 71 or is 94. The invention also includes a mutant or variant protein any of whose residues may be changed from the corresponding residues shown in any one of SEQ ID NO:2n, wherein n is an integer between 1 and 71 or is 94, while still encoding a protein that maintains its NOVX activities and physiological functions, or a functional fragment thereof.

[0120] One aspect of the invention pertains to isolated NOVX proteins, and biologically-active portions thereof, or derivatives, fragments, analogs or homologs thereof. Also provided are polypeptide fragments suitable for use as immunogens to raise anti-NOVX antibodies. In one embodiment, native NOVX proteins can be isolated from cells or tissue sources by an appropriate purification scheme using standard protein purification techniques. In another embodiment, NOVX proteins are produced by recombinant DNA techniques. Alternative to recombinant expression, a NOVX protein or polypeptide can be synthesized chemically using standard peptide synthesis techniques.

[0121] An “isolated” or “purified” polypeptide or protein or biologically-active portion thereof is substantially free of cellular material or other contaminating proteins from the cell or tissue source from which the NOVX protein is derived, or substantially free from chemical precursors or other chemicals when chemically synthesized. The language “substantially free of cellular material” includes preparations of NOVX proteins in which the protein is separated from cellular components of the cells from which it is isolated or recombinantly-produced. In one embodiment, the language “substantially free of cellular material” includes preparations of NOVX proteins having less than about 30% (by dry weight) of non-NOVX proteins (also referred to herein as a “contaminating protein”), preferably less than about 20% of non-NOVX proteins, more preferably less than about 10%, even more preferably less than about 5%, and most preferably less than 1-2% of non-NOVX proteins. When the NOVX protein or biologically-active portion thereof is recombinantly-produced, it is also preferably substantially free of culture medium, i.e., culture medium represents less than about 20%, preferably less than about 10%, even more preferably less than about 5%, and most preferably less than 1-2% of the volume of the NOVX protein preparation.

[0122] The language “substantially free of chemical precursors or other chemicals” includes preparations of NOVX proteins in which the protein is separated from chemical precursors or other chemicals that are involved in the synthesis of the protein. In one embodiment, the language “substantially free of chemical precursors or other chemicals” includes preparations of NOVX proteins having less than about 30% (by dry weight) of chemical precursors or non-NOVX chemicals, preferably less than about 20%, even more preferably less than about 10% still more preferably less than about 5%, and most preferably less that 1-2% chemical precursors or non-NOVX chemicals.

[0123] Biologically-active portions of NOVX proteins include peptides comprising amino acid sequences sufficiently homologous to or derived from the amino acid sequences of the NOVX proteins (e.g., the amino acid sequence of SEQ ID NO:2n, wherein n is an integer between 1 and 71 or is 94) that include fewer amino acids than the full-length NOVX proteins, and exhibit at least one activity of a NOVX protein. Typically, biologically-active portions comprise a domain or motif with at least one activity of the NOVX protein. A biologically-active portion of a NOVX protein can be a polypeptide which is, for example, 10, 25, 50, 100 or more amino acid residues in length.

[0124] Moreover, other biologically-active portions, in which other regions of the protein are deleted, can be prepared by recombinant techniques and evaluated for one or more of the functional activities of a native NOVX protein.

[0125] In an embodiment, the NOVX protein has an amino acid sequence of SEQ ID NO:2n, wherein n is an integer between 1 and 71 or is 94. In other embodiments, the NOVX protein is substantially homologous to SEQ ID NO:2n, wherein n is an integer between 1 and 71 or is 94, and retains the functional activity of the protein of SEQ ID NO:2n, wherein n is an integer between 1 and 71 or is 94, yet differs in amino acid sequence due to natural allelic variation or mutagenesis, as described in detail, below. Accordingly, in another embodiment, the NOVX protein is a protein that comprises an amino acid sequence at least about 80% homologous to the amino acid sequence of SEQ ID NO:2n, wherein n is an integer between 1 and 71 or is 94, and retains the functional activity of the NOVX proteins of SEQ ID NO:2n, wherein n is an integer between 1 and 71 or is 94.

[0126] Determining Homology Between Two or More Sequences

[0127] To determine the percent homology of two amino acid sequences or of two nucleic acids, the sequences are aligned for optimal comparison purposes (e.g., gaps can be introduced in the sequence of a first amino acid or nucleic acid sequence for optimal alignment with a second amino or nucleic acid sequence). The amino acid residues or nucleotides at corresponding amino acid positions or nucleotide positions are then compared. When a position in the first sequence is occupied by the same amino acid residue or nucleotide as the corresponding position in the second sequence, then the molecules are homologous at that position (i.e., as used herein amino acid or nucleic acid “homology” is equivalent to amino acid or nucleic acid “identity”).

[0128] The nucleic acid sequence homology may be determined as the degree of identity between two sequences. The homology may be determined using computer programs known in the art, such as GAP software provided in the GCG program package. See, J Mol Biol 48: 443-453,1970. Using GCG GAP software with the following settings for nucleic acid sequence comparison: GAP creation penalty of 5.0 and GAP extension penalty of 0.3, the coding region of the analogous nucleic acid sequences referred to above exhibits a degree of identity preferably of at least 70%, 75%, 80%, 85%, 90%, 95%, 98%, or 99%, with the CDS (encoding) part of the DNA sequence of SEQ ID NO:2n-1, wherein n is an integer between 1 and 71.

[0129] The term “sequence identity” refers to the degree to which two polynucleotide or polypeptide sequences are identical on a residue-by-residue basis over a particular region of comparison. The term “percentage of sequence identity” is calculated by comparing two optimally aligned sequences over that region of comparison, determining the number of positions at which the identical nucleic acid base (e.g., A, T, C, G, U, or 1, in the case of nucleic acids) occurs in both sequences to yield the number of matched positions, dividing the number of matched positions by the total number of positions in the region of comparison (i.e., the window size), and multiplying the result by 100 to yield the percentage of sequence identity. The term “substantial identity” as used herein denotes a characteristic of a polynucleotide sequence, wherein the polynucleotide comprises a sequence that has at least 80 percent sequence identity, preferably at least 85 percent identity and often 90 to 95 percent sequence identity, more usually at least 99 percent sequence identity as compared to a reference sequence over a comparison region.

[0130] Chimeric and Fusion Proteins

[0131] The invention also provides NOVX chimeric or fusion proteins. As used herein, a NOVX “chimeric protein” or “fusion protein” comprises a NOVX polypeptide operatively-linked to a non-NOVX polypeptide. An “NOVX polypeptide” refers to a polypeptide having an amino acid sequence corresponding to a NOVX protein of SEQ ID NO:2n, wherein n is an integer between 1 and 71 or is 94, whereas a “non-NOVX polypeptide” refers to a polypeptide having an amino acid sequence corresponding to a protein that is not substantially homologous to the NOVX protein, e.g., a protein that is different from the NOVX protein and that is derived from the same or a different organism. Within a NOVX fusion protein the NOVX polypeptide can correspond to all or a portion of a NOVX protein. In one embodiment, a NOVX fusion protein comprises at least one biologically-active portion of a NOVX protein. In another embodiment, a NOVX fusion protein comprises at least two biologically-active portions of a NOVX protein. In yet another embodiment, a NOVX fusion protein comprises at least three biologically-active portions of a NOVX protein. Within the fusion protein, the term “operatively-linked” is intended to indicate that the NOVX polypeptide and the non-NOVX polypeptide are fused in-frame with one another. The non-NOVX polypeptide can be fused to the N-terminus or C-terminus of the NOVX polypeptide.

[0132] In one embodiment, the fusion protein is a GST-NOVX fusion protein in which the NOVX sequences are fused to the C-terminus of the GST (glutathione S-transferase) sequences. Such fusion proteins can facilitate the purification of recombinant NOVX polypeptides.

[0133] In another embodiment, the fusion protein is a NOVX protein containing a heterologous signal sequence at its N-terminus. In certain host cells (e.g., mammalian host cells), expression and/or secretion of NOVX can be increased through use of a heterologous signal sequence.

[0134] In yet another embodiment, the fusion protein is a NOVX-immunoglobulin fusion protein in which the NOVX sequences are fused to sequences derived from a member of the immunoglobulin protein family. The NOVX-immunoglobulin fusion proteins of the invention can be incorporated into pharmaceutical compositions and administered to a subject to inhibit an interaction between a NOVX ligand and a NOVX protein on the surface of a cell, to thereby suppress NOVX-mediated signal transduction in vivo. The NOVX-immunoglobulin fusion proteins can be used to affect the bioavailability of a NOVX cognate ligand. Inhibition of the NOVX ligand/NOVX interaction may be useful therapeutically for both the treatment of proliferative and differentiative disorders, as well as modulating (e.g. promoting or inhibiting) cell survival. Moreover, the NOVX-immunoglobulin fusion proteins of the invention can be used as immunogens to produce anti-NOVX antibodies in a subject, to purify NOVX ligands, and in screening assays to identify molecules that inhibit the interaction of NOVX with a NOVX ligand.

[0135] A NOVX chimeric or fusion protein of the invention can be produced by standard recombinant DNA techniques. For example, DNA fragments coding for the different polypeptide sequences are ligated together in-frame in accordance with conventional techniques, e.g., by employing blunt-ended or stagger-ended termini for ligation, restriction enzyme digestion to provide for appropriate termini, filling-in of cohesive ends as appropriate, alkaline phosphatase treatment to avoid undesirable joining, and enzymatic ligation. In another embodiment, the fusion gene can be synthesized by conventional techniques including automated DNA synthesizers. Alternatively, PCR amplification of gene fragments can be carried out using anchor primers that give rise to complementary overhangs between two consecutive gene fragments that can subsequently be annealed and reamplified to generate a chimeric gene sequence (see, e.g., Ausubel, et al. (eds.) CURRENT PROTOCOLS IN MOLECULAR BIOLOGY, John Wiley & Sons, 1992). Moreover, many expression vectors are commercially available that already encode a fusion moiety (e.g., a GST polypeptide). A NOVX-encoding nucleic acid can be cloned into such an expression vector such that the fusion moiety is linked in-frame to the NOVX protein.

[0136] NOVX Agonists and Antagonists

[0137] The invention also pertains to variants of the NOVX proteins that function as either NOVX agonists (i.e., mimetics) or as NOVX antagonists. Variants of the NOVX protein can be generated by mutagenesis (e.g., discrete point mutation or truncation of the NOVX protein). An agonist of the NOVX protein can retain substantially the same, or a subset of, the biological activities of the naturally occurring form of the NOVX protein. An antagonist of the NOVX protein can inhibit one or more of the activities of the naturally occurring form of the NOVX protein by, for example, competitively binding to a downstream or upstream member of a cellular signaling cascade which includes the NOVX protein. Thus, specific biological effects can be elicited by treatment with a variant of limited function. In one embodiment, treatment of a subject with a variant having a subset of the biological activities of the naturally occurring form of the protein has fewer side effects in a subject relative to treatment with the naturally occurring form of the NOVX proteins.

[0138] Variants of the NOVX proteins that function as either NOVX agonists (i.e., mimetics) or as NOVX antagonists can be identified by screening combinatorial libraries of mutants (e.g., truncation mutants) of the NOVX proteins for NOVX protein agonist or antagonist activity. In one embodiment, a variegated library of NOVX variants is generated by combinatorial mutagenesis at the nucleic acid level and is encoded by a variegated gene library. A variegated library of NOVX variants can be produced by, for example, enzymatically ligating a mixture of synthetic oligonucleotides into gene sequences such that a degenerate set of potential NOVX sequences is expressible as individual polypeptides, or alternatively, as a set of larger fusion proteins (e.g., for phage display) containing the set of NOVX sequences therein. There are a variety of methods which can be used to produce libraries of potential NOVX variants from a degenerate oligonucleotide sequence. Chemical synthesis of a degenerate gene sequence can be performed in an automatic DNA synthesizer, and the synthetic gene then ligated into an appropriate expression vector. Use of a degenerate set of genes allows for the provision, in one mixture, of all of the sequences encoding the desired set of potential NOVX sequences. Methods for synthesizing degenerate oligonucleotides are well-known within the art. See, e.g., Tetrahedron 39: 3,1983; Annu. Rev. Biochem. 53: 323,1984; Science 198: 1056, 1984; Nucl. Acids Res. 11: 477,1983.

[0139] Anti-NOVX Antibodies

[0140] Included in the invention are antibodies to NOVX proteins, or fragments of NOVX proteins or a derivative, fragment, analog, homolog or ortholog thereof. The term “antibody” as used herein refers to immunoglobulin molecules and immunologically active portions of immunoglobulin (Ig) molecules, i.e., molecules that contain an antigen binding site that specifically binds (immunoreacts with) an antigen. Such antibodies include, but are not limited to, polyclonal, monoclonal, chimeric, single chain, F_{ab}, F_{ab}, and F_{(ab′)2} fragments, and an Fab expression library. Antibodies may be any of the classes IgG, IgM, IgA, IgE and IgD, and include subclasses such as IgG₁, IgG₂, and others. The light chain may be a kappa chain or a lambda chain. Reference herein to antibodies includes a reference to all such classes, subclasses and types of antibody species.

[0141] An isolated NOVX full length protein or a portion or fragment thereof, can be used as an immunogen to generate antibodies that immunospecifically bind the antigen, using standard techniques for polyclonal and monoclonal antibody preparation. An antigenic peptide fragment comprises at least 6 amino acid residues of the amino acid sequence of the full length protein, such as an amino acid sequence of SEQ ID NO:2n, wherein n is an integer between 1 and 71 or is 94, and encompasses an epitope. The antigenic peptide may comprise at least 10 amino acid residues, or at least 15, at least 20, or at least 30 amino acid residues. Epitopes may encompassed by the antigenic peptide are regions of the protein that are located on its surface; commonly these are hydrophilic regions.

[0142] In certain embodiments of the invention, at least one epitope encompassed by the antigenic peptide is a region of NOVX that is located on the surface of the protein, e.g., a hydrophilic region and may be determined by a hydrophobicity analysis of the NOVX protein sequence. As a means for targeting antibody production, hydropathy plots showing regions of hydrophilicity and hydrophobicity may be generated by any method well known in the art (for example see Proc. Nat. Acad. Sci. USA 78: 3824-3828,1981; J. Mol. Biol. 157:105-142, 1982).

[0143] The term “epitope” includes any protein determinant capable of specific binding to an immunoglobulin or T-cell receptor. Epitopic determinants usually consist of chemically active surface groupings of molecules such as amino acids or sugar side chains and usually have specific three dimensional structural characteristics, as well as specific charge characteristics. A NOVX polypeptide or a fragment thereof comprises at least one antigenic epitope. An anti-NOVX antibody of the present invention is said to specifically bind to antigen NOVX when the equilibrium binding constant (K_{D}) is ≦1 μM, preferably ≦100 nM, more preferably ≦10 nM, and most preferably ≦100 pM to about 1 pM, as measured by assays including radioligand binding assays or similar assays known to skilled artisans.

[0144] Various procedures known within the art may be used for the production of polyclonal or monoclonal antibodies directed against a protein of the invention, or against derivatives, fragments, analogs homologs or orthologs thereof (see, for example, Antibodies: A Laboratory Manual, Harlow E, and Lane D, 1988, Cold Spring Harbor Laboratory Press, Cold Spring Harbor, N.Y.).

[0145] In another embodiment NOVX nucleic acid molecules are used directly for production of antibodies recognizing NOVX polypeptides. Antibodies can be prepared by genetic or DNA-based immunization. It has been shown that intramuscular immunization of mice with a naked DNA plasmid led to expression of reporter proteins in muscle cells (Science 247: 1465-1468, 1990) and that this technology could stimulate an immune response (Nature. 356: 152-154, 1992). The success of genetic immunization in stimulating both cellular and humoral immune responses has been widely reported (reviewed in: Annu. Rev. Immunol. 15: 617-648, 1997; Immunol. Today 19: 89-97, 1998; Annu. Rev. Immunol. 18: 927-974, 2000). Using this technology, antibodies can be generated through immunization with a cDNA sequence encoding the protein in question. Following genetic immunization, the animal's immune system is activated in response to the synthesis of the foreign protein.

[0146] The quantity of protein produced in vivo following genetic immunization is within the picogram to nanogram range, which is much lower than the amounts of protein introduced by conventional immunization protocols. Despite these low levels of protein, a very efficient immune response is achieved due to the foreign protein being expressed directly in, or is quickly taken up by antigen-presenting dendritic cells (J. Leuk. Biol. 66: 350-356, 1999; J. Exp. Med. 186: 1481-1486, 1997; Nat. Med. 2: 1122-1128, 1996). A further increase in the effectivity of genetic immunization is due to the inherent immune-enhancing properties of the DNA itself, i.e., the presence of CpG-motifs in the plasmid backbone, which activate both dendritic cells (J. Immunol. 161: 3042-3049, 1998) and B-cells (Nature 374: 546-549, 1995).

[0147] Genetic immunization and production of high affinity monoclonal antibodies has been successful in mice (Biotechniques 16: 616-620, 1994; J. Biotechnol. 51: 191-194, 1996; Hybridoma 17: 569-576, 1998; J. Virol. 72: 4541-4545, 1998; J. Immunol. 160: 1458-1465, 1998; J. Biotechnol. 73: 119-129, 1999). It has been shown that monoclonal antibodies of the mature IgG subclasses can be obtained (Hybridoma 17: 569-576, 1998) and single chain libraries can be generated from genetically immunized mice (Proc. Natl. Acad. Sci. USA 95: 669-674, 1998). It has also been shown that genetic immunization can generate antibodies in other species such as rabbits (J. Lipid. Res. 38: 2627-2632, 1997) and turkeys (J. Lipid. Res. 38: 2627-2632, 1999). Genetic immunization has been used for the production of human antibodies recognizing extracellular targets.

[0148] Humanized Antibodies

[0149] Anti NOVX antibodies can further comprise humanized or human antibodies. Humanization can be performed following methods known in the art (Nature, 321:522-525, 1986; Nature, 332:323-327, 1988; Science, 239:1534-1536, 1988; U.S. Pat. No. 5,225,539; and Curr. Op. Struct. Biol., 2:593-596, 1992).

[0150] Human Antibodies

[0151] Fully human antibodies are antibody molecules in which the entire sequence of both the light chain and the heavy chain, including the CDRs, arise from human genes. Such antibodies are termed “human antibodies”, or “fully human antibodies” herein. Human monoclonal antibodies can be prepared by methods known in the art, see Immunol Today 4: 72, 1983; In: MONOCLONAL ANTIBODIES AND CANCER THERAPY, Alan R. Liss, Inc., pp. 77-96,1985; Proc Natl Acad Sci USA 80: 2026-2030, 1983; In: MONOCLONAL ANTIBODIES AND CANCER THERAPY, Alan R. Liss, Inc., pp. 77-96, 1985; J. Mol. Biol., 227:381, 1991; J. Mol. Biol., 222:581, 1991; U.S. Pat. Nos. 5,545,807; 5,545,806; 5,569,825; 5,625,126; 5,633,425; 5,661,016; Bio/Technology 10, 779-783, 1992; Nature 368 856-859, 1994; Nature 368, 812-13, 1994; Nature Biotechnology 14, 845-51, 1996; Nature Biotechnology 14, 826, 1996; and Intern. Rev. Immunol. 13, 65-93, 1995; PCT publication WO94/02602; WO 96/33735 and WO 96/34096; U.S. Pat. Nos. 5,939,598 and 5,916,771; PCT publication WO 99/53049.

[0152] F_{ab} Fragments and Single Chain Antibodies

[0153] According to the invention, techniques can be adapted for the production of single-chain antibodies specific to an antigenic protein of the invention (see e.g., U.S. Pat. No. 4,946,778). In addition, methods can be adapted for the construction of F_{ab} expression libraries (see e.g., Science 246: 1275-1281, 1989) to allow rapid and effective identification of monoclonal F_{ab} fragments with the desired specificity for a protein or derivatives, fragments, analogs or homologs thereof. Antibody fragments that contain the idiotypes to a protein antigen may be produced by techniques known in the art including, but not limited to: (i) an F_{(ab′)2} fragment produced by pepsin digestion of an antibody molecule; (ii) an F_{ab} fragment generated by reducing the disulfide bridges of an F_{(ab′)2} fragment; (iii) an F_{ab} fragment generated by the treatment of the antibody molecule with papain and a reducing agent and (iv) Fᵥ fragments.

[0154] Bispecific Antibodies

[0155] Bispecific antibodies are monoclonal, preferably human or humanized, antibodies that have binding specificities for at least two different antigens. In the present case, one of the binding specificities is for an antigenic protein of the invention. The second binding target is any other antigen, and advantageously is a cell-surface protein or receptor or receptor subunit.

[0156] Methods for making bispecific antibodies are known in the art, see Nature, 305:537-539, 1983 and may be purified by affinity chromatography steps, also see WO 93/08829; EMBO J., 10:3655-3659, 1991. For further details of generating bispecific antibodies see, for example, Methods in Enzymology, 121:210 (1986); WO 96/27011; Science 229:81 (1985); J. Exp. Med. 175:217-225 (1992) J. Immunol. 148(5):1547-1553 (1992); “diabody” technology described in Proc. Natl. Acad. Sci. USA 90:6444-6448 (1993); and single-chain Fv (sFv) dimers in J. Immunol. 152:5368 (1994). Antibodies with more than two valencies are contemplated, see for example J. Immunol. 147:60 (1991).

[0157] Heteroconjugate Antibodies

[0158] Heteroconjugate antibodies composed of two covalently joined antibodies are also within the scope of the present invention, see for example, U.S. Pat. No. 4,676,980; WO 91/00360; WO 92/200373; EP 03089. It is contemplated that the antibodies can be prepared in vitro using known methods in synthetic protein chemistry, including those involving crosslinking agents. For example, immunotoxins can be constructed using a disulfide exchange reaction or by forming a thioether bond. Examples of suitable reagents for this purpose include iminothiolate and methyl-4-mercaptobutyrimidate and those disclosed, for example, in U.S. Pat. No. 4,676,980.

[0159] Effector Function Engineering

[0160] It can be desirable to modify the antibody of the invention with respect to effector function, see for example, J. Exp Med., 176: 1191-1195, 1992; J. Immunol., 148:2918-2922, 1992;Cancer Research, 53: 2560-2565, 1993; Anti-Cancer Drug Design, 3: 219-230, 1989.

[0161] Immunoconjugates

[0162] The invention also pertains to immunoconjugates comprising an antibody conjugated to a cytotoxic agent such as a chemotherapeutic agent, toxin (e.g., an enzymatically active toxin of bacterial, fungal, plant, or animal origin, or fragments thereof), or a radioactive isotope (i.e., a radioconjugate).

[0163] Chemotherapeutic agents useful in the generation of such immunoconjugates have been described above. Enzymatically active toxins and fragments thereof that can be used include diphtheria A chain, nonbinding active fragments of diphtheria toxin, exotoxin A chain (from Pseudomonas aeruginosa), ricin A chain, abrin A chain, modeccin A chain, alpha-sarcin, Aleurites fordii proteins, dianthin proteins, Phytolaca americana proteins (PAPI, PAPII, and PAP-S), momordica charantia inhibitor, curcin, crotin, sapaonaria officinalis inhibitor, gelonin, mitogellin, restrictocin, phenomycin, enomycin, and the tricothecenes. A variety of radionuclides are available for the production of radioconjugated antibodies. Examples include ²¹²Bi, ¹³¹I, ¹³¹In, ⁹⁰Y, and ¹⁸⁶Re.

[0164] Conjugates of the antibody and cytotoxic agent are made using a variety of bifunctional protein-coupling agents such as N-succinimidyl-3-(2-pyridyldithiol) propionate (SPDP), iminothiolane (IT), bifunctional derivatives of imidoesters (such as dimethyl adipimidate HCL), active esters (such as disuccinimidyl suberate), aldehydes (such as glutareldehyde), bis-azido compounds (such as bis (p-azidobenzoyl) hexanediamine), bis-diazonium derivatives (such as bis-(p-diazoniumbenzoyl)-ethylenediamine), diisocyanates (such as tolyene 2,6-diisocyanate), and bis-active fluorine compounds (such as 1,5-difluoro-2,4-dinitrobenzene). For example, a ricin immunotoxin can be prepared as described Science, 238: 1098, 1987. Carbon-14-labeled 1-isothiocyanatobenzyl-3-methyldiethylene triaminepentaacetic acid (MX-DTPA) is an exemplary chelating agent for conjugation of radionucleotide to the antibody. See WO94/11026.

[0165] In another embodiment, the antibody can be conjugated to a “receptor” (such streptavidin) for utilization in tumor pretargeting wherein the antibody-receptor conjugate is administered to the patient, followed by removal of unbound conjugate from the circulation using a clearing agent and then administration of a “ligand” (e.g., avidin) that is in turn conjugated to a cytotoxic agent.

[0166] Immunoliposomes

[0167] The antibodies disclosed herein can also be formulated as immunoliposomes prepared by methods known in the art, such as described in PNAS USA, 82: 3688, 1985; PNAS USA, 77: 4030, 1980; and U.S. Pat. Nos. 4,485,045; 4,544,545; and 5,013,556; J. Biol. Chem., 257: 286-288, 1982; J. National Cancer Inst., 81(19): 1484, 1989.

[0168] Diagnostic Applications of Antibodies Directed Against the Proteins of the Invention

[0169] In one embodiment, methods for the screening of antibodies that possess the desired specificity include, but are not limited to, enzyme linked immunosorbent assay (ELISA) and other immunologically mediated techniques known within the art. In a specific embodiment, selection of antibodies that are specific to a particular domain of an NOVX protein is facilitated by generation of hybridomas that bind to the fragment of an NOVX protein possessing such a domain. Thus, antibodies that are specific for a desired domain within an NOVX protein, or derivatives, fragments, analogs or homologs thereof, are also provided herein.

[0170] Antibodies directed against a NOVX protein of the invention may be used in methods known within the art relating to the localization and/or quantitation of a NOVX protein (e.g., for use in measuring levels of the NOVX protein within appropriate physiological samples, for use in diagnostic methods, for use in imaging the protein, and the like). In a given embodiment, antibodies specific to a NOVX protein, or derivative, fragment, analog or homolog thereof, that contain the antibody derived antigen binding domain, are utilized as pharmacologically active compounds (referred to hereinafter as “Therapeutics”).

[0171] An antibody specific for a NOVX protein of the invention (e.g., a monoclonal antibody or a polyclonal antibody) can be used to isolate a NOVX polypeptide by standard techniques, such as immunoaffinity, chromatography or immunoprecipitation. An antibody to a NOVX polypeptide can facilitate the purification of a natural NOVX antigen from cells, or of a recombinantly produced NOVX antigen expressed in host cells. Moreover, such an anti-NOVX antibody can be used to detect the antigenic NOVX protein (e.g., in a cellular lysate or cell supernatant) in order to evaluate the abundance and pattern of expression of the antigenic NOVX protein. Antibodies directed against a NOVX protein can be used diagnostically to monitor protein levels in tissue as part of a clinical testing procedure, e.g., to, for example, determine the efficacy of a given treatment regimen. Detection can be facilitated by coupling (i.e., physically linking) the antibody to a detectable substance. Examples of detectable substances include various enzymes, prosthetic groups, fluorescent materials, luminescent materials, bioluminescent materials, and radioactive materials. Examples of suitable enzymes include horseradish peroxidase, alkaline phosphatase, □-galactosidase, or acetylcholinesterase; examples of suitable prosthetic group complexes include streptavidin/biotin and avidin/biotin; examples of suitable fluorescent materials include umbelliferone, fluorescein, fluorescein isothiocyanate, rhodamine, dichlorotriazinylamine fluorescein, dansyl chloride or phycoerythrin; an example of a luminescent material includes luminol; examples of bioluminescent materials include luciferase, luciferin, and aequorin, and examples of suitable radioactive material include ¹²⁵I, ¹³¹I, ¹³⁵S or ³H.

[0172] Antibody Therapeutics

[0173] Antibodies of the invention, including polyclonal, monoclonal, humanized and fully human antibodies, may used as therapeutic agents. Such agents will generally be employed to treat or prevent a disease or pathology in a subject. An antibody preparation, preferably one having high specificity and high affinity for its target antigen, is administered to the subject and will generally have an effect due to its binding with the target. Such an effect may be one of two kinds, depending on the specific nature of the interaction between the given antibody molecule and the target antigen in question. In the first instance, administration of the antibody may abrogate or inhibit the binding of the target with an endogenous ligand to which it naturally binds. In this case, the antibody binds to the target and masks a binding site of the naturally occurring ligand, wherein the ligand serves as an effector molecule. Thus the receptor mediates a signal transduction pathway for which ligand is responsible.

[0174] Alternatively, the effect may be one in which the antibody elicits a physiological result by virtue of binding to an effector binding site on the target molecule. In this case the target, a receptor having an endogenous ligand which may be absent or defective in the disease or pathology, binds the antibody as a surrogate effector ligand, initiating a receptor-based signal transduction event by the receptor.

[0175] A therapeutically effective amount of an antibody of the invention relates generally to the amount needed to achieve a therapeutic objective. As noted above, this may be a binding interaction between the antibody and its target antigen that, in certain cases, interferes with the functioning of the target, and in other cases, promotes a physiological response. The amount required to be administered will furthermore depend on the binding affinity of the antibody for its specific antigen, and will also depend on the rate at which an administered antibody is depleted from the free volume other subject to which it is administered. Common ranges for therapeutically effective dosing of an antibody or antibody fragment of the invention may be, by way of nonlimiting example, from about 0.1 mg/kg body weight to about 50 mg/kg body weight. Common dosing frequencies may range, for example, from twice daily to once a week.

[0176] Pharmaceutical Compositions of Antibodies

[0177] Antibodies specifically binding a protein of the invention, as well as other molecules identified by the screening assays disclosed herein, can be administered for the treatment of various disorders in the form of pharmaceutical compositions. Principles and considerations involved in preparing such compositions, as well as guidance in the choice of components are provided, for example, in Remington: The Science And Practice Of Pharmacy 19th ed. (Alfonso R. Gennaro, et al., editors) Mack Pub. Co., Easton, Pa.: 1995; Drug Absorption Enhancement: Concepts, Possibilities, Limitations, And Trends, Harwood Academic Publishers, Langhorne, Pa., 1994; and Peptide And Protein Drug Delivery (Advances In Parenteral Sciences, Vol. 4), 1991, M. Dekker, New York.

[0178] If the antigenic protein is intracellular and whole antibodies are used as inhibitors, internalizing antibodies are preferred. However, liposomes can also be used to deliver the antibody, or an antibody fragment, into cells. Where antibody fragments are used, the smallest inhibitory fragment that specifically binds to the binding domain of the target protein is preferred. For example, based upon the variable-region sequences of an antibody, peptide molecules can be designed that retain the ability to bind the target protein sequence. Such peptides can be synthesized chemically and/or produced by recombinant DNA technology. See, e.g., PNAS USA, 90: 7889-7893, 1993. The formulation herein can also contain more than one active compound as necessary for the particular indication being treated, preferably those with complementary activities that do not adversely affect each other. Alternatively, or in addition, the composition can comprise an agent that enhances its function, such as, for example, a cytotoxic agent, cytokine, chemotherapeutic agent, or growth-inhibitory agent. Such molecules are suitably present in combination in amounts that are effective for the purpose intended.

[0179] The active ingredients can also be entrapped in microcapsules prepared, for example, by coacervation techniques or by interfacial polymerization, for example, hydroxymethylcellulose or gelatin-microcapsules and poly-(methylmethacrylate) microcapsules, respectively, in colloidal drug delivery systems (for example, liposomes, albumin microspheres, microemulsions, nano-particles, and nanocapsules) or in macroemulsions.

[0180] The formulations to be used for in vivo administration must be sterile. This is readily accomplished by filtration through sterile filtration membranes.

[0181] Sustained-release preparations can be prepared. Suitable examples of sustained-release preparations include semipermeable matrices of solid hydrophobic polymers containing the antibody, which matrices are in the form of shaped articles, e.g., films, or microcapsules. Examples of sustained-release matrices include polyesters, hydrogels (for example, poly (2-hydroxyethyl-methacrylate), or poly(vinylalcohol)), polylactides (U.S. Pat. No. 3,773,919), copolymers of L-glutamic acid and γ ethyl-L-glutamate, non-degradable ethylene-vinyl acetate, degradable lactic acid-glycolic acid copolymers such as the LUPRON DEPOT™(injectable microspheres composed of lactic acid-glycolic acid copolymer and leuprolide acetate), and poly-D-(−)-3-hydroxybutyric acid. While polymers such as ethylene-vinyl acetate and lactic acid-glycolic acid enable release of molecules for over 100 days, certain hydrogels release proteins for shorter time periods.

[0182] ELISA Assay

[0183] An agent for detecting an analyte protein is for example, an antibody capable of binding to an analyte protein, preferably an antibody with a detectable label. Antibodies can be polyclonal, or more preferably, monoclonal. An intact antibody, or a fragment thereof (e.g., F_{ab} or F_{(ab) 2}) can be used. The term “labeled”, with regard to the probe or antibody, is intended to encompass direct labeling of the probe or antibody by coupling (i.e., physically linking) a detectable substance to the probe or antibody, as well as indirect labeling of the probe or antibody by reactivity with another reagent that is directly labeled. Examples of indirect labeling include detection of a primary antibody using a fluorescently-labeled secondary antibody and end-labeling of a DNA probe with biotin such that it can be detected with fluorescently-labeled streptavidin. The term “biological sample” is intended to include tissues, cells and biological fluids isolated from a subject, as well as tissues, cells and fluids present within a subject. Included within the usage of the term “biological sample”, therefore, is blood and a fraction or component of blood including blood serum, blood plasma, or lymph. That is, the detection method of the invention can be used to detect an analyte mRNA, protein, or genomic DNA in a biological sample in vitro as well as in vivo. For example, in vitro techniques for detection of an analyte mRNA include Northern hybridizations and in situ hybridizations. In vitro techniques for detection of an analyte protein include enzyme linked immunosorbent assays (ELISAs), Western blots, immunoprecipitations, and immunofluorescence. In vitro techniques for detection of an analyte genomic DNA include Southern hybridizations. Procedures for conducting immunoassays are described, for example in “ELISA: Theory and Practice: Methods in Molecular Biology”, Vol. 42, J. R. Crowther (Ed.) Human Press, Totowa, N.J., 1995; “Immunoassay”, E. Diamandis and T. Christopoulus, Academic Press, Inc., San Diego, Calif., 1996; and “Practice and Theory of Enzyme Immunoassays”, P. Tijssen, Elsevier Science Publishers, Amsterdam, 1985. Furthermore, in vivo techniques for detection of an analyte protein include introducing into a subject a labeled anti-an analyte protein antibody. For example, the antibody can be labeled with a radioactive marker whose presence and location in a subject can be detected by standard imaging techniques.

[0184] NOVX Recombinant Expression Vectors and Host Cells

[0185] Another aspect of the invention pertains to vectors, preferably expression vectors, containing a nucleic acid encoding a NOVX protein, or derivatives, fragments, analogs or homologs thereof. As used herein, the term “vector” refers to a nucleic acid molecule capable of transporting another nucleic acid to which it has been linked. One type of vector is a “plasmid”, which refers to a circular double stranded DNA loop into which additional DNA segments can be ligated. Another type of vector is a viral vector, wherein additional DNA segments can be ligated into the viral genome. Certain vectors are capable of autonomous replication in a host cell into which they are introduced (e.g., bacterial vectors having a bacterial origin of replication and episomal mammalian vectors). Other vectors (e.g., non-episomal mammalian vectors) are integrated into the genome of a host cell upon introduction into the host cell, and thereby are replicated along with the host genome. Moreover, certain vectors are capable of directing the expression of genes to which they are operatively-linked. Such vectors are referred to herein as “expression vectors”. In general, expression vectors of utility in recombinant DNA techniques are often in the form of plasmids. In the present specification, “plasmid” and “vector” can be used interchangeably as the plasmid is the most commonly used form of vector. However, the invention is intended to include such other forms of expression vectors, such as viral vectors (e.g., replication defective retroviruses, adenoviruses and adeno-associated viruses), which serve equivalent functions.

[0186] The recombinant expression vectors of the invention comprise a nucleic acid of the invention in a form suitable for expression of the nucleic acid in a host cell, which means that the recombinant expression vectors include one or more regulatory sequences, selected on the basis of the host cells to be used for expression, that is operatively-linked to the nucleic acid sequence to be expressed. Within a recombinant expression vector, “operably-linked” is intended to mean that the nucleotide sequence of interest is linked to the regulatory sequence(s) in a manner that allows for expression of the nucleotide sequence (e.g., in an in vitro transcription/translation system or in a host cell when the vector is introduced into the host cell).

[0187] The term “regulatory sequence” is intended to includes promoters, enhancers and other expression control elements (e.g., polyadenylation signals). Such regulatory sequences are described, for example, in Goeddel, GENE EXPRESSION TECHNOLOGY: METHODS IN ENZYMOLOGY 185, Academic Press, San Diego, Calif. (1990). Regulatory sequences include those that direct constitutive expression of a nucleotide sequence in many types of host cell and those that direct expression of the nucleotide sequence only in certain host cells (e.g., tissue-specific regulatory sequences). It will be appreciated by those skilled in the art that the design of the expression vector can depend on such factors as the choice of the host cell to be transformed, the level of expression of protein desired, etc. The expression vectors of the invention can be introduced into host cells to thereby produce proteins or peptides, including fusion proteins or peptides, encoded by nucleic acids as described herein (e.g., NOVX proteins, mutant forms of NOVX proteins, fusion proteins, etc.).

[0188] The recombinant expression vectors of the invention can be designed for expression of NOVX proteins in prokaryotic or eukaryotic cells. For example, NOVX proteins can be expressed in bacterial cells such as Escherichia coli, insect cells (using baculovirus expression vectors) yeast cells or mammalian cells. Suitable host cells are discussed further in Goeddel, GENE EXPRESSION TECHNOLOGY: METHODS IN ENZYMOLOGY 185, Academic Press, San Diego, Calif. (1990). Alternatively, the recombinant expression vector can be transcribed and translated in vitro, for example using T7 promoter regulatory sequences and T7 polymerase.

[0189] Expression of proteins in prokaryotes is most often carried out in Escherichia coli with vectors containing constitutive or inducible promoters directing the expression of either fusion or non-fusion proteins. Fusion vectors add a number of amino acids to a protein encoded therein, usually to the amino terminus of the recombinant protein. Such fusion vectors typically serve three purposes: (i) to increase expression of recombinant protein; (ii) to increase the solubility of the recombinant protein; and (iii) to aid in the purification of the recombinant protein by acting as a ligand in affinity purification. Often, in fusion expression vectors, a proteolytic cleavage site is introduced at the junction of the fusion moiety and the recombinant protein to enable separation of the recombinant protein from the fusion moiety subsequent to purification of the fusion protein. Such enzymes, and their cognate recognition sequences, include Factor Xa, thrombin and enterokinase. Typical fusion expression vectors include pGEX (Pharmacia Biotech Inc; Gene 67: 31-40,1988, pMAL (New England Biolabs, Beverly, Mass.) and pRIT5 (Pharmacia, Piscataway, N.J.) that fuse glutathione S-transferase (GST), maltose E binding protein, or protein A, respectively, to the target recombinant protein.

[0190] Examples of suitable inducible non-fusion E. coli expression vectors include pTrc (Gene 69:301-315, 1988) and pET 11d (GENE EXPRESSION TECHNOLOGY: METHODS IN ENZYMOLOGY 185, Academic Press, San Diego, Calif. (1990) 60-89).

[0191] One strategy to maximize recombinant protein expression in E. coli is to express the protein in a host bacteria with an impaired capacity to proteolytically cleave the recombinant protein. See, e.g., GENE EXPRESSION TECHNOLOGY: METHODS IN ENZYMOLOGY 185, Academic Press, San Diego, Calif. (1990) 119-128. Another strategy is to alter the nucleic acid sequence of the nucleic acid to be inserted into an expression vector so that the individual codons for each amino acid are those preferentially utilized in E. coli (e.g., Nucl. Acids Res. 20: 2111-2118, 1992). Such alteration of nucleic acid sequences of the invention can be carried out by standard DNA synthesis techniques.

[0192] In another embodiment, the NOVX expression vector is a yeast expression vector. Examples of vectors for expression in yeast Saccharomyces cerivisae include pYepSec1 (EMBO J. 6: 229-234, 1987), pMFa (Cell 30: 933-943, 1982), pJRY88 (Gene 54: 113-123, 1987), pYES2 (Invitrogen Corporation, San Diego, Calif.), and picZ (InVitrogen Corp, San Diego, Calif.).

[0193] Alternatively, NOVX can be expressed in insect cells using baculovirus expression vectors. Baculovirus vectors available for expression of proteins in cultured insect cells (e.g., SF9 cells) include the pAc series (Mol. Cell. Biol. 3: 2156-2165, 1983) and the pVL series (Virology 170: 31-39, 1989).

[0194] In yet another embodiment, a nucleic acid of the invention is expressed in mammalian cells using a mammalian expression vector. Examples of mammalian expression vectors include pCDM8 (Nature 329: 840, 1987) and pMT2PC (EMBO J. 6:187-195, 1987). When used in mammalian cells, the expression vector's control functions are often provided by viral regulatory elements. For example, commonly used promoters are derived from polyoma, adenovirus 2, cytomegalovirus, and simian virus 40. For other suitable expression systems for both prokaryotic and eukaryotic cells see, e.g., Chapters 16 and 17 of Sambrook, et al., MOLECULAR CLONING: A LABORATORY MANUAL. 2nd ed., Cold Spring Harbor Laboratory, Cold Spring Harbor Laboratory Press, Cold Spring Harbor, N.Y., 1989.

[0195] In another embodiment, the recombinant mammalian expression vector is capable of directing expression of the nucleic acid preferentially in a particular cell type (e.g., tissue-specific regulatory elements are used to express the nucleic acid). Tissue-specific regulatory elements are known in the art. Non-limiting examples of suitable tissue-specific promoters include the albumin promoter (liver-specific; Genes Dev. 1: 268-277, 1987), lymphoid-specific promoters (Adv. Immunol. 43: 235-275, 1988), in particular promoters of T cell receptors (EMBO J. 8: 729-733, 1989) and immunoglobulins (Cell 33: 729-740, 1983; Cell 33: 741-748, 1983), neuron-specific promoters (e.g., the neurofilament promoter; PNAS USA 86: 5473-5477, 1989), pancreas-specific promoters (Science 230: 912-916, 1985), and mammary gland-specific promoters (e.g., milk whey promoter; U.S. Pat. No. 4,873,316 and European Application Publication No. 264,166). Developmentally-regulated promoters are also encompassed, e.g., the murine hox promoters (Science 249: 374-379, 1990) and the α-fetoprotein promoter (Genes Dev. 3: 537-546, 1989).

[0196] The invention further provides a recombinant expression vector comprising a DNA molecule of the invention cloned into the expression vector in an antisense orientation. That is, the DNA molecule is operatively-linked to a regulatory sequence in a manner that allows for expression (by transcription of the DNA molecule) of an RNA molecule that is antisense to NOVX mRNA. Regulatory sequences operatively linked to a nucleic acid cloned in the antisense orientation can be chosen that direct the continuous expression of the antisense RNA molecule in a variety of cell types, for instance viral promoters and/or enhancers, or regulatory sequences can be chosen that direct constitutive, tissue specific or cell type specific expression of antisense RNA. The antisense expression vector can be in the form of a recombinant plasmid, phagemid or attenuated virus in which antisense nucleic acids are produced under the control of a high efficiency regulatory region, the activity of which can be determined by the cell type into which the vector is introduced. For a discussion of the regulation of gene expression using antisense genes see, e.g., “Antisense RNA as a molecular tool for genetic analysis,” Reviews-Trends in Genetics, Vol. 1(1) 1986.

[0197] Another aspect of the invention pertains to host cells into which a recombinant expression vector of the invention has been introduced. The terms “host cell” and “recombinant host cell” are used interchangeably herein. It is understood that such terms refer not only to the particular subject cell but also to the progeny or potential progeny of such a cell. Because certain modifications may occur in succeeding generations due to either mutation or environmental influences, such progeny may not, in fact, be identical to the parent cell, but are still included within the scope of the term as used herein.

[0198] A host cell can be any prokaryotic or eukaryotic cell. For example, NOVX protein can be expressed in bacterial cells such as E. coli, insect cells, yeast or mammalian cells (such as Chinese hamster ovary cells (CHO) or COS cells). Other suitable host cells are known to those skilled in the art.

[0199] Vector DNA can be introduced into prokaryotic or eukaryotic cells via conventional transformation or transfection techniques. As used herein, the terms “transformation” and “transfection” are intended to refer to a variety of art-recognized techniques for introducing foreign nucleic acid (e.g., DNA) into a host cell, including calcium phosphate or calcium chloride co-precipitation, DEAE-dextran-mediated transfection, lipofection, or electroporation. Suitable methods for transforming or transfecting host cells can be found in Sambrook, et al. (MOLECULAR CLONING: A LABORATORY MANUAL. 2nd ed., Cold Spring Harbor Laboratory, Cold Spring Harbor Laboratory Press, Cold Spring Harbor, N.Y., 1989), and other laboratory manuals.

[0200] For stable transfection of mammalian cells, it is known that, depending upon the expression vector and transfection technique used, only a small fraction of cells may integrate the foreign DNA into their genome. In order to identify and select these integrants, a gene that encodes a selectable marker (e.g., resistance to antibiotics) is generally introduced into the host cells along with the gene of interest. Various selectable markers include those that confer resistance to drugs, such as G418, hygromycin and methotrexate. Nucleic acid encoding a selectable marker can be introduced into a host cell on the same vector as that encoding NOVX or can be introduced on a separate vector. Cells stably transfected with the introduced nucleic acid can be identified by drug selection (e.g., cells that have incorporated the selectable marker gene will survive, while the other cells die).

[0201] A host cell of the invention, such as a prokaryotic or eukaryotic host cell in culture, can be used to produce (i.e., express) NOVX protein. Accordingly, the invention further provides methods for producing NOVX protein using the host cells of the invention. In one embodiment, the method comprises culturing the host cell of invention (into which a recombinant expression vector encoding NOVX protein has been introduced) in a suitable medium such that NOVX protein is produced. In another embodiment, the method further comprises isolating NOVX protein from the medium or the host cell.

[0202] Transgenic NOVX Animals

[0203] The host cells of the invention can also be used to produce non-human transgenic animals by methods known in the art, for example as described in U.S. Pat. Nos. 4,736,866; 4,870,009; and 4,873,191; and Hogan, 1986. In: MANIPULATING THE MOUSE EMBRYO, Cold Spring Harbor Laboratory Press, Cold Spring Harbor, N.Y; Cell 51: 503 (1987); Cell 69: 915, 1992; In: TERATOCARCINOMAS AND EMBRYONIC STEM CELLS: A PRACTICAL APPROACH, Robertson, ed. IRL, Oxford, pp. 113-152, 1987; Curr. Opin. Biotechnol. 2: 823-829, 1991; PCT International Publication Nos.: WO 90/11354; WO 91/01140; WO 92/0968; and WO 93/04169; the cre/loxP recombinase system PNAS USA 89: 6232-6236, 1992; a recombinase system Science 251:1351-1355, 1991; and clones of the non-human transgenic animals described in Nature 385: 810-813, 1997.

[0204] Pharmaceutical Compositions

[0205] The NOVX nucleic acid molecules, NOVX proteins, and anti-NOVX antibodies (also referred to herein as “active compounds”) of the invention, and derivatives, fragments, analogs and homologs thereof, can be incorporated into pharmaceutical compositions suitable for administration. Such compositions typically comprise the nucleic acid molecule, protein, or antibody and a pharmaceutically acceptable carrier. As used herein, “pharmaceutically acceptable carrier” is intended to include any and all solvents, dispersion media, coatings, antibacterial and antifungal agents, isotonic and absorption delaying agents, and the like, compatible with pharmaceutical administration. Suitable carriers are described in the most recent edition of Remington's Pharmaceutical Sciences, a standard reference text in the field, which is incorporated herein by reference. Preferred examples of such carriers or diluents include, but are not limited to, water, saline, finger's solutions, dextrose solution, and 5% human serum albumin. Liposomes and non-aqueous vehicles such as fixed oils may also be used. The use of such media and agents for pharmaceutically active substances is well known in the art. Except insofar as any conventional media or agent is incompatible with the active compound, use thereof in the compositions is contemplated. Supplementary active compounds can also be incorporated into the compositions.

[0206] A pharmaceutical composition of the invention is formulated to be compatible with its intended route of administration. Examples of routes of administration include parenteral, e.g., intravenous, intradermal, subcutaneous, oral (e.g., inhalation), transdermal (i.e., topical), transmucosal, and rectal administration. Solutions or suspensions used for parenteral, intradermal, or subcutaneous application can include the following components: a sterile diluent such as water for injection, saline solution, fixed oils, polyethylene glycols, glycerine, propylene glycol or other synthetic solvents; antibacterial agents such as benzyl alcohol or methyl parabens; antioxidants such as ascorbic acid or sodium bisulfite; chelating agents such as ethylenediaminetetraacetic acid (EDTA); buffers such as acetates, citrates or phosphates, and agents for the adjustment of tonicity such as sodium chloride or dextrose. The pH can be adjusted with acids or bases, such as hydrochloric acid or sodium hydroxide. The parenteral preparation can be enclosed in ampoules, disposable syringes or multiple dose vials made of glass or plastic.

[0207] Pharmaceutical compositions suitable for injectable use include sterile aqueous solutions (where water soluble) or dispersions and sterile powders for the extemporaneous preparation of sterile injectable solutions or dispersion. For intravenous administration, suitable carriers include physiological saline, bacteriostatic water, Cremophor EL™ (BASF, Parsippany, N.J.) or phosphate buffered saline (PBS). In all cases, the composition must be sterile and should be fluid to the extent that easy syringeability exists. It must be stable under the conditions of manufacture and storage and must be preserved against the contaminating action of microorganisms such as bacteria and fungi. The carrier can be a solvent or dispersion medium containing, for example, water, ethanol, polyol (for example, glycerol, propylene glycol, and liquid polyethylene glycol, and the like), and suitable mixtures thereof. The proper fluidity can be maintained, for example, by the use of a coating such as lecithin, by the maintenance of the required particle size in the case of dispersion and by the use of surfactants. Prevention of the action of microorganisms can be achieved by various antibacterial and antifungal agents, for example, parabens, chlorobutanol, phenol, ascorbic acid, thimerosal, and the like. In many cases, it will be preferable to include isotonic agents, for example, sugars, polyalcohols such as manitol, sorbitol, sodium chloride in the composition. Prolonged absorption of the injectable compositions can be brought about by including in the composition an agent which delays absorption, for example, aluminum monostearate and gelatin.

[0208] Sterile injectable solutions can be prepared by incorporating the active compound (e.g., a NOVX protein or anti-NOVX antibody) in the required amount in an appropriate solvent with one or a combination of ingredients enumerated above, as required, followed by filtered sterilization. Generally, dispersions are prepared by incorporating the active compound into a sterile vehicle that contains a basic dispersion medium and the required other ingredients from those enumerated above. In the case of sterile powders for the preparation of sterile injectable solutions, methods of preparation are vacuum drying and freeze-drying that yields a powder of the active ingredient plus any additional desired ingredient from a previously sterile-filtered solution thereof.

[0209] Oral compositions generally include an inert diluent or an edible carrier. They can be enclosed in gelatin capsules or compressed into tablets. For the purpose of oral therapeutic administration, the active compound can be incorporated with excipients and used in the form of tablets, troches, or capsules. Oral compositions can also be prepared using a fluid carrier for use as a mouthwash, wherein the compound in the fluid carrier is applied orally and swished and expectorated or swallowed. Pharmaceutically compatible binding agents, and/or adjuvant materials can be included as part of the composition. The tablets, pills, capsules, troches and the like can contain any of the following ingredients, or compounds of a similar nature: a binder such as microcrystalline cellulose, gum tragacanth or gelatin; an excipient such as starch or lactose, a disintegrating agent such as alginic acid, Primogel, or corn starch; a lubricant such as magnesium stearate or Sterotes; a glidant such as colloidal silicon dioxide; a sweetening agent such as sucrose or saccharin; or a flavoring agent such as peppermint, methyl salicylate, or orange flavoring.

[0210] For administration by inhalation, the compounds are delivered in the form of an aerosol spray from pressured container or dispenser which contains a suitable propellant, e.g., a gas such as carbon dioxide, or a nebulizer.

[0211] Systemic administration can also be by transmucosal or transdermal means. For transmucosal or transdermal administration, penetrants appropriate to the barrier to be permeated are used in the formulation. Such penetrants are generally known in the art, and include, for example, for transmucosal administration, detergents, bile salts, and fusidic acid derivatives. Transmucosal administration can be accomplished through the use of nasal sprays or suppositories. For transdermal administration, the active compounds are formulated into ointments, salves, gels, or creams as generally known in the art.

[0212] The compounds can also be prepared in the form of suppositories (e.g., with conventional suppository bases such as cocoa butter and other glycerides) or retention enemas for rectal delivery.

[0213] In one embodiment, the active compounds are prepared with carriers that will protect the compound against rapid elimination from the body, such as a controlled release formulation, including implants and microencapsulated delivery systems. Biodegradable, biocompatible polymers can be used, such as ethylene vinyl acetate, polyanhydrides, polyglycolic acid, collagen, polyorthoesters, and polylactic acid. Methods for preparation of such formulations will be apparent to those skilled in the art. The materials can also be obtained commercially from Alza Corporation and Nova Pharmaceuticals, Inc. Liposomal suspensions (including liposomes targeted to infected cells with monoclonal antibodies to viral antigens) can also be used as pharmaceutically acceptable carriers. These can be prepared according to methods known to those skilled in the art, for example, as described in U.S. Pat. No. 4,522,811.

[0214] It is especially advantageous to formulate oral or parenteral compositions in dosage unit form for ease of administration and uniformity of dosage. Dosage unit form as used herein refers to physically discrete units suited as unitary dosages for the subject to be treated; each unit containing a predetermined quantity of active compound calculated to produce the desired therapeutic effect in association with the required pharmaceutical carrier. The specification for the dosage unit forms of the invention are dictated by and directly dependent on the unique characteristics of the active compound and the particular therapeutic effect to be achieved, and the limitations inherent in the art of compounding such an active compound for the treatment of individuals.

[0215] The nucleic acid molecules of the invention can be inserted into vectors and used as gene therapy vectors. Gene therapy vectors can be delivered to a subject by, for example, intravenous injection, local administration (see, e.g., U.S. Pat. No. 5,328,470) or by stereotactic injection (see, e.g., PNAS. USA 91: 3054-3057, 1994). The pharmaceutical preparation of the gene therapy vector can include the gene therapy vector in an acceptable diluent, or can comprise a slow release matrix in which the gene delivery vehicle is imbedded. Alternatively, where the complete gene delivery vector can be produced intact from recombinant cells, e.g., retroviral vectors, the pharmaceutical preparation can include one or more cells that produce the gene delivery system.

[0216] The pharmaceutical compositions can be included in a container, pack, or dispenser together with instructions for administration.

[0217] Screening and Detection Methods

[0218] The isolated nucleic acid molecules of the invention can be used to express NOVX protein (e.g., via a recombinant expression vector in a host cell in gene therapy applications), to detect NOVX mRNA (e.g., in a biological sample) or a genetic lesion in a NOVX gene, and to modulate NOVX activity, as described further, below. In addition, the NOVX proteins can be used to screen drugs or compounds that modulate the NOVX protein activity or expression as well as to treat disorders characterized by insufficient or excessive production of NOVX protein or production of NOVX protein forms that have decreased or aberrant activity compared to NOVX wild-type protein (e.g.; diabetes (regulates insulin release); obesity (binds and transport lipids); metabolic disturbances associated with obesity, the metabolic syndrome X as well as anorexia and wasting disorders associated with chronic diseases and various cancers, and infectious disease (possesses anti-microbial activity) and the various dyslipidemias. In addition, the anti-NOVX antibodies of the invention can be used to detect and isolate NOVX proteins and modulate NOVX activity. In yet a further aspect, the invention can be used in methods to influence appetite, absorption of nutrients and the disposition of metabolic substrates in both a positive and negative fashion.

[0219] The invention further pertains to novel agents identified by the screening assays described herein and uses thereof for treatments as described, supra.

[0220] Screening Assays

[0221] The invention provides a method (also referred to herein as a “screening assay”) for identifying modulators, i.e., candidate or test compounds or agents (e.g., peptides, peptidomimetics, small molecules or other drugs) that bind to NOVX proteins or have a stimulatory or inhibitory effect on, e.g., NOVX protein expression or NOVX protein activity. The invention also includes compounds identified in the screening assays described herein.

[0222] In one embodiment, the invention provides assays for screening candidate or test compounds which bind to or modulate the activity of the membrane-bound form of a NOVX protein or polypeptide or biologically-active portion thereof. The test compounds of the invention can be obtained using any of the numerous approaches in combinatorial library methods known in the art, including: biological libraries; spatially addressable parallel solid phase or solution phase libraries; synthetic library methods requiring deconvolution; the “one-bead one-compound” library method; and synthetic library methods using affinity chromatography selection. The biological library approach is limited to peptide libraries, while the other four approaches are applicable to peptide, non-peptide oligomer or small molecule libraries of compounds. See, e.g., Anticancer Drug Design 12:145, 1997.

[0223] A “small molecule” as used herein, is meant to refer to a composition that has a molecular weight of less than about 5 kD and most preferably less than about 4 kD. Small molecules can be, e.g., nucleic acids, peptides, polypeptides, peptidomimetics, carbohydrates, lipids or other organic or inorganic molecules. Libraries of chemical and/or biological mixtures, such as fungal, bacterial, or algal extracts, are known in the art and can be screened with any of the assays of the invention.

[0224] Examples of methods for the synthesis of molecular libraries can be found in the art, for example in: PNAS U.S.A. 90:6909, 1993;PNAS U.S.A. 91:11422, 1994; J. Med. Chem. 37:2678, 1994; Science 261:1303, 1993; Angew. Chem. Int Ed. Engl. 33:2059, 1994; Angew. Chem. Int Ed. Engl. 33: 2061, 1994; and J. Med. Chem. 37:1233, 1994.

[0225] Libraries of compounds may be presented in solution (e.g., Biotechniques 13: 412-421, 1992), or on beads (Nature 354: 82-84, 1991), on chips (Nature 364: 555-556, 1993), bacteria (U.S. Pat. No. 5,223,409), spores (U.S. Pat. No. 5,233,409), plasmids (PNAS USA 89: 1865-1869, 1992) or on phage (Science 249: 386-390,1990; Science 249: 404-406, 1990; PNAS USA 87: 6378-6382,1990; J. Mol. Biol. 222: 301-310,1991; U.S. Pat. No. 5,233,409).

[0226] In one embodiment, an assay is a cell-based assay in which a cell which expresses a membrane-bound form of NOVX protein, or a biologically-active portion thereof, on the cell surface is contacted with a test compound and the ability of the test compound to bind to a NOVX protein determined. The ability of the test compound to bind to the NOVX protein can be detected for example, by coupling the test compound with a radioisotope (e.g. ¹²⁵I, ³⁵S, ¹⁴C, or ³H, either directly or indirectly), or enzymatic label (e.g. horseradish peroxidase, alkaline phosphatase, or luciferase) such that binding of the test compound to the NOVX protein or biologically-active portion thereof can be determined by detecting the labeled compound in a complex. In one embodiment, the assay comprises contacting a cell which expresses a NOVX protein, or a biologically-active portion thereof, with a known compound which binds NOVX to form an assay mixture, contacting the assay mixture with a test compound, and determining the ability of the test compound to interact with a NOVX protein, either compared to or in competition with the known compound.

[0227] In another embodiment, an assay is a cell-based comprising contacting a cell expressing a NOVX protein, or a biologically-active portion thereof, with a test compound and determining the ability of the test compound to modulate (e.g., stimulate or inhibit) the activity of the NOVX protein or biologically-active portion thereof. As used herein, a “target molecule” is a molecule with which a NOVX protein binds or interacts. In one embodiment, a NOVX target molecule is a component of a signal transduction pathway that facilitates transduction of an extracellular signal

[0228] Determining the ability of the NOVX protein to bind to or interact with a NOVX target molecule can be accomplished for example, by one of the methods described above or by determining the activity of the target molecule. For example, the activity of the target molecule can be determined by detecting induction of a cellular second messenger of the target (i.e. intracellular Ca²⁺, diacylglycerol, IP₃, etc.), detecting catalytic/enzymatic activity of the target an appropriate substrate, detecting the induction of a reporter gene (comprising a NOVX-responsive regulatory element operatively linked to a nucleic acid encoding a detectable marker, e.g., luciferase), or detecting a cellular response, for example, cell survival, cellular differentiation, or cell proliferation.

[0229] In yet another embodiment, an assay of the invention is a cell-free assay comprising contacting a NOVX protein or biologically-active portion thereof with a test compound and determining directly or indirectly the ability of the test compound to bind to the NOVX protein or biologically-active portion thereof.

[0230] In still another embodiment, an assay is a cell-free assay comprising contacting NOVX protein or biologically-active portion thereof with a test compound and determining the ability of the test compound to modulate (e.g. stimulate or inhibit) the activity of the NOVX protein or biologically-active portion thereof.

[0231] The cell-free assays of the invention are amenable to use of both the soluble form or the membrane-bound form of NOVX protein. In the case of cell-free assays comprising the membrane-bound form of NOVX protein, it may be desirable to utilize a solubilizing agent such that the membrane-bound form of NOVX protein is maintained in solution. Examples of such solubilizing agents include non-ionic detergents such as n-octylglucoside, n-dodecylglucoside, n-dodecylmaltoside, octanoyl-N-methylglucamide, decanoyl-N-methylglucamide, Triton® X-100, Triton® X-114, Thesit®, Isotridecypoly(ethylene glycol ether)ₙ, N-dodecyl-N,N-dimethyl-3-ammonio-1-propane sulfonate, 3-(3-cholam idopropyl) dimethylamminiol-1-propane sulfonate (CHAPS), or 3-(3-cholamidopropyl)dimethylamminiol-2-hydroxy-1-propane sulfonate (CHAPSO).

[0232] In more than one embodiment of the above assay methods of the invention, it may be desirable to immobilize either NOVX protein or its target molecule to facilitate separation of complexed from uncomplexed forms of one or both of the proteins, as well as to accommodate automation of the assay. In one embodiment, a fusion protein can be provided that adds a domain that allows one or both of the proteins to be bound to a matrix. For example, GST-NOVX fusion proteins or GST-target fusion proteins can be adsorbed onto glutathione sepharose beads (Sigma Chemical, St. Louis, Mo.) or glutathione derivatized microtiter plates. The NOVX protein or its target molecule can be immobilized utilizing conjugation of biotin and streptavidin using techniques well-known within the art (e.g., biotinylation kit, Pierce Chemicals, Rockford, Ill.). Alternatively, antibodies reactive with NOVX protein or target molecules, but which do not interfere with binding of the NOVX protein to its target molecule, can be derivatized to the wells of the plate. Methods for detecting such complexes, in addition to those described above for the GST-immobilized complexes, include immunodetection of complexes using antibodies reactive with the NOVX protein or target molecule, as well as enzyme-linked assays that rely on detecting an enzymatic activity associated with the NOVX protein or target molecule.

[0233] In another embodiment, modulators of NOVX protein expression are identified in a method wherein a cell is contacted with a candidate compound and the expression of NOVX mRNA or protein in the cell is determined. The level of expression of NOVX mRNA or protein in the presence of the candidate compound is compared to the level of expression of NOVX mRNA or protein in the absence of the candidate compound. The candidate compound can then be identified as a modulator of NOVX mRNA or protein expression based upon this comparison. For example, when expression of NOVX mRNA or protein is greater (i.e., statistically significantly greater) in the presence of the candidate compound than in its absence, the candidate compound is identified as a stimulator of NOVX mRNA or protein expression. Alternatively, when expression of NOVX mRNA or protein is less (statistically significantly less) in the presence of the candidate compound than in its absence, the candidate compound is identified as an inhibitor of NOVX mRNA or protein expression. The level of NOVX mRNA or protein expression in the cells can be determined by methods described herein for detecting NOVX mRNA or protein.

[0234] In yet another aspect of the invention, the NOVX proteins can be used as “bait proteins” in a two-hybrid assay or three hybrid assay (see, e.g., U.S. Pat. No. 5,283,317; Cell 72: 223-232, 1993; J. Biol. Chem. 268: 12046-12054, 1993; Biotechniques 14: 920-924, 1993; Oncogene 8: 1693-1696, 1993; and WO 94/10300), to identify other proteins that bind to or interact with NOVX (“NOVX-binding proteins” or “NOVX-bp”) and modulate NOVX activity. Such NOVX-binding proteins are also involved in the propagation of signals by the NOVX proteins as, for example, upstream or downstream elements of the NOVX pathway.

[0235] The invention further pertains to novel agents identified by the aforementioned screening assays and uses thereof for treatments as described herein.

[0236] Detection Assays

[0237] Portions or fragments of the cDNA sequences identified herein (and the corresponding complete gene sequences) can be used in numerous ways as polynucleotide reagents. By way of example, and not of limitation, these sequences can be used to: (i) map their respective genes on a chromosome; and, thus, locate gene regions associated with genetic disease; (ii) identify an individual from a minute biological sample (tissue typing); and (iii) aid in forensic identification of a biological sample. Some of these applications are described in the subsections, below.

[0238] Chromosome Mapping

[0239] Once the sequence (or a portion of the sequence) of a gene has been isolated, this sequence can be used to map the location of the gene on a chromosome (“chromosome mapping”). Briefly, NOVX genes can be mapped to chromosomes by preparing PCR primers (preferably 15-25 bp in length) from the NOVX sequences. Computer analysis of the NOVX, sequences can be used to rapidly select primers that do not span more than one exon in the genomic DNA, thus complicating the amplification process. These primers can then be used for PCR screening of somatic cell hybrids containing individual human chromosomes. Only those hybrids containing the human gene corresponding to the NOVX sequences will yield an amplified fragment. See for example Science 220: 919-924 (1983). Somatic cell hybrids containing only fragments of human chromosomes can also be produced by using human chromosomes with translocations and deletions.

[0240] Fluorescence in situ hybridization (FISH) of a DNA sequence to a metaphase chromosomal spread can further be used to provide a precise chromosomal location, see, Verma, et al., HUMAN CHROMOSOMES: A MANUAL OF BASIC TECHNIQUES (Pergamon Press, New York 1988).

[0241] Once a sequence has been mapped to a precise chromosomal location, the physical position of the sequence on the chromosome can be correlated with genetic map data, e.g., in McKusick, MENDELIAN INHERITANCE IN MAN, available on-line through Johns Hopkins University Welch Medical Library). The relationship between genes and disease, mapped to the same chromosomal region, can then be identified through linkage analysis (co-inheritance of physically adjacent genes), described in, e.g., Egeland, et al., 1987. Nature, 325: 783-787.

[0242] Moreover, differences in the DNA sequences between individuals affected and unaffected with a disease associated with the NOVX gene, can be determined. If a mutation is observed in some or all of the affected individuals but not in any unaffected individuals, then the mutation is likely to be the causative agent of the particular disease. Comparison of affected and unaffected individuals generally involves first looking for structural alterations in the chromosomes, such as deletions or translocations that are visible from chromosome spreads or detectable using PCR based on that DNA sequence. Ultimately, complete sequencing of genes from several individuals can be performed to confirm the presence of a mutation and to distinguish mutations from polymorphisms.

[0243] Predictive Medicine

[0244] The invention also pertains to the field of predictive medicine in which diagnostic assays, prognostic assays, pharmacogenomics, and monitoring clinical trials are used for prognostic (predictive) purposes to thereby treat an individual prophylactically. Accordingly, one aspect of the invention relates to diagnostic assays for determining NOVX protein and/or nucleic acid expression as well as NOVX activity, in the context of a biological sample (e.g., blood, serum, cells, tissue) to thereby determine whether an individual is afflicted with a disease or disorder, or is at risk of developing a disorder, associated with aberrant NOVX expression or activity. The disorders include, but are not limited to metabolic disorders, diabetes, obesity, infectious disease, anorexia, cancer-associated cachexia, cancer, neurodegenerative disorders, Alzheimer's Disease, Parkinson's Disorder, immune disorders, and hematopoietic disorders, and the various dyslipidemias, metabolic disturbances associated with obesity, the metabolic syndrome X and wasting disorders associated with chronic diseases and various cancers.

[0245] Another aspect of the invention provides methods for determining NOVX protein, nucleic acid expression or activity in an individual to thereby select appropriate therapeutic or prophylactic agents for that individual (referred to herein as “pharmacogenomics”). Pharmacogenomics allows for the selection of agents (e.g., drugs) for therapeutic or prophylactic treatment of an individual based on the genotype of the individual (e.g., the genotype of the individual examined to determine the ability of the individual to respond to a particular agent.)

[0246] Yet another aspect of the invention pertains to monitoring the influence of agents (e.g., drugs, compounds) on the expression or activity of NOVX in clinical trials.

[0247] An exemplary method for detecting the presence or absence of NOVX in a biological sample involves obtaining a biological sample from a test subject and contacting the biological sample with a compound or an agent capable of detecting NOVX protein or the nucleic acid (e.g., mRNA, genomic DNA) that encodes NOVX protein such that the presence of NOVX is detected in the biological sample. An agent for detecting NOVX mRNA or genomic DNA is a labeled nucleic acid probe capable of hybridizing to NOVX mRNA or genomic DNA as described herein. An agent for detecting NOVX protein can be an antibody capable of binding to NOVX protein, preferably an antibody with a detectable label as described herein. In one embodiment, the biological sample contains protein molecules from the test subject. Alternatively, the biological sample can contain mRNA molecules from the test subject or genomic DNA molecules from the test subject.

[0248] The invention also encompasses kits for detecting the presence of NOVX in a biological sample. For example, the kit can comprise: a labeled compound or agent capable of detecting NOVX protein or mRNA in a biological sample; means for determining the amount of NOVX in the sample; and/or means for comparing the amount of NOVX in the sample with a standard. The compound or agent can be packaged in a suitable container. The kit can further comprise instructions for using the kit to detect NOVX protein or nucleic acid.

[0249] Assays described herein can be used to determine whether a subject can be administered an agent (e.g., an agonist, antagonist, peptidomimetic, protein, peptide, nucleic acid, small molecule, or other drug candidate) to treat a disease or disorder associated with aberrant NOVX expression or activity.

[0250] The methods of the invention can also be used to detect genetic lesions in a NOVX gene (characterized by at least one of an alteration affecting the integrity of a gene encoding a NOVX-protein, or the misexpression of the NOVX gene), thereby determining if a subject with the lesioned gene is at risk for a disorder characterized by aberrant cell proliferation and/or differentiation. For example, such genetic lesions can be detected by ascertaining the existence of at least one of: (i) a deletion of one or more nucleotides from a NOVX gene; (i) an addition of one or more nucleotides to a NOVX gene; (iii) a substitution of one or more nucleotides of a NOVX gene, (iv) a chromosomal rearrangement of a NOVX gene; (v) an alteration in the level of a messenger RNA transcript of a NOVX gene, (vi) aberrant modification of a NOVX gene, such as of the methylation pattern of the genomic DNA, (vii) the presence of a non-wild-type splicing pattern of a messenger RNA transcript of a NOVX gene, (viii) a non-wild-type level of a NOVX protein, (ix) allelic loss of a NOVX gene, and (x) inappropriate post-translational modification of a NOVX protein.

[0251] In certain embodiments, detection of the lesion involves the use of a probe/primer in a polymerase chain reaction (PCR) (see, e.g., U.S. Pat. Nos. 4,683,195 and 4,683,202), such as anchor PCR or RACE PCR, or, alternatively, in a ligation chain reaction (LCR) (see, e.g., Science 241: 1077-1080, 1988; and PNAS USA 91: 360-364, 1994), the latter of which can be particularly useful for detecting point mutations in the NOVX-gene (see, Nucl. Acids Res. 23: 675-682, 1995). This method can include the steps of collecting a sample of cells from a patient, isolating nucleic acid (e.g., genomic, mRNA or both) from the cells of the sample, contacting the nucleic acid sample with one or more primers that specifically hybridize to a NOVX gene under conditions such that hybridization and amplification of the NOVX gene (if present) occurs, and detecting the presence or absence of an amplification product, or detecting the size of the amplification product and comparing the length to a control sample

[0252] Alternative amplification methods include: self sustained sequence replication (PNAS USA 87: 1874-1878, 1990), transcriptional amplification system (PNAS USA 86: 1173-1177, 1989); Qu Replicase (BioTechnology 6: 1197, 1988), or any other nucleic acid amplification method, followed by the detection of the amplified molecules using techniques well known to those of skill in the art. These detection schemes are especially useful for the detection of nucleic acid molecules if such molecules are present in very low numbers.

[0253] In an alternative embodiment, mutations in a NOVX gene from a sample cell can be identified by alterations in restriction enzyme cleavage patterns. For example, sample and control DNA is isolated, amplified (optionally), digested with one or more restriction endonucleases, and fragment length sizes are determined by gel electrophoresis and compared. Differences in fragment length sizes between sample and control DNA indicates mutations in the sample DNA. Moreover, the use of sequence specific ribozymes (see, e.g., U.S. Pat. No. 5,493,531) can be used to score for the presence of specific mutations by development or loss of a ribozyme cleavage site.

[0254] In other embodiments, genetic mutations in NOVX can be identified by hybridizing a sample and control nucleic acids, e.g., DNA or RNA, to high-density arrays containing hundreds or thousands of oligonucleotides probes (e.g., Human Mutation 7: 244-255, 1996; Nat Med. 2: 753-759, 1996). For example, by two dimensional arrays containing light-generated DNA probes. Briefly, a first hybridization array of probes can be used to scan through long stretches of DNA in a sample and control to identify base changes between the sequences by making linear arrays of sequential overlapping probes. This step allows the identification of point mutations. This is followed by a second hybridization array that allows the characterization of specific mutations by using smaller, specialized probe arrays complementary to all variants or mutations detected. Each mutation array is composed of parallel probe sets, one complementary to the wild-type gene and the other complementary to the mutant gene.

[0255] In yet another embodiment, any of a variety of sequencing reactions known in the art can be used to directly sequence the NOVX gene and detect mutations by comparing the sequence of the sample NOVX with the corresponding wild-type (control) sequence. For examples of sequencing reactions see PNAS USA 74: 560 (1977); PNAS USA 74: 5463 (1977); Biotechniques 19: 448, 1995; WO 94/16101; Adv. Chromatography 36: 127-162, 1996; and Appl. Biochem. Biotechnol. 38:147-159, 1993.

[0256] Other methods for detecting mutations in the NOVX gene include methods in which protection from cleavage agents is used to detect mismatched bases in RNA/RNA or RNA/DNA heteroduplexes see, e.g., Science 230:1242, 1985; PNAS USA 85: 4397, 1988; Methods Enzymol. 217: 286-295, 1992.

[0257] In still another embodiment, the mismatch cleavage reaction employs one or more proteins that recognize mismatched base pairs in double-stranded DNA (so called “DNA mismatch repair” enzymes) in defined systems for detecting and mapping point mutations in NOVX cDNAs, see Carcinogenesis 15:1657-1662, 1994; U.S. Pat. No. 5,459,039.

[0258] In other embodiments, alterations in electrophoretic mobility will be used to identify mutations in NOVX genes. For example, single strand conformation polymorphism (SSCP) may be used to detect differences in electrophoretic mobility between mutant and wild type nucleic acids, (PNAS USA: 86: 2766, 1989; Mutat Res. 285:125-144, 1993; Genet. Anal. Tech. Appl. 9: 73-79, 1992; Trends Genet. 7: 5, 1991).

[0259] In yet another embodiment, the movement of mutant or wild-type fragments in polyacrylamide gels containing a gradient of denaturant is assayed using denaturing gradient gel electrophoresis (DGGE) e.g. Nature 313: 495, 1985; Biophys. Chem. 265: 12753, 1987. Examples of other techniques for detecting point mutations include, but are not limited to, selective oligonucleotide hybridization, selective amplification, or selective primer extension, e.g. Nature 324: 163, 1986; PNAS USA 86: 6230, 1989.

[0260] Alternatively, allele specific amplification technology that depends on selective PCR amplification may be used in conjunction with the instant invention. Oligonucleotides used as primers for specific amplification may carry the mutation of interest in the center of the molecule (so that amplification depends on differential hybridization e.g., Nucl. Acids Res. 17: 2437-2448, 1989) or at the extreme 3′-terminus of one primer where, under appropriate conditions, mismatch can prevent, or reduce polymerase extension (e.g., Tibtech. 11: 238, 1993). In addition it may be desirable to introduce a novel restriction site in the region of the mutation to create cleavage-based detection, e.g., Mol. Cell Probes 6: 1, 1992. It is anticipated that in certain embodiments amplification may also be performed using Taq ligase for amplification, e.g., PNAS. USA 88: 189, 1991. In such cases, ligation will occur only if there is a perfect match at the 3′-terminus of the 5′ sequence, making it possible to detect the presence of a known mutation at a specific site by looking for the presence or absence of amplification.

[0261] The methods described herein may be performed, for example, by utilizing pre-packaged diagnostic kits comprising at least one probe nucleic acid or antibody reagent described herein, which may be conveniently used, e.g., in clinical settings to diagnose patients exhibiting symptoms or family history of a disease or illness involving a NOVX gene.

[0262] Pharmacogenomics

[0263] Agents, or modulators that have a stimulatory or inhibitory effect on NOVX activity (e.g., NOVX gene expression), as identified by a screening assay described herein can be administered to individuals to treat (prophylactically or therapeutically) disorders. The disorders include but are not limited to, e.g., those diseases, disorders and conditions listed above, and more particularly include those diseases, disorders, or conditions associated with homologs of a NOVX protein, such as those summarized in Table A.

[0264] Pharmacogenomics, the study of the relationship between an individual's genotype and that individual's response to a foreign compound or drug permits the selection of effective agents (e.g., drugs) for prophylactic or therapeutic treatments based on a consideration of the individual's genotype. Such pharmacogenomics can further be used to determine appropriate dosages and therapeutic regimens. Accordingly, the activity of NOVX protein, expression of NOVX nucleic acid, or mutation content of NOVX genes in an individual can be determined to thereby select appropriate agent(s) for therapeutic or prophylactic treatment of the individual.

[0265] Pharmacogenomics deals with clinically significant hereditary variations in the response to drugs due to altered drug disposition and abnormal action in affected persons, e.g., Clin. Exp. Pharmacol. Physiol., 23: 983-985, 1996; Clin. Chem., 43: 254-266, 1997. In general, two types of pharmacogenetic conditions can be differentiated. Genetic conditions transmitted as a single factor altering the way drugs act on the body (altered drug action) or genetic conditions transmitted as single factors altering the way the body acts on drugs (altered drug metabolism).

[0266] Thus, the activity of NOVX protein, expression of NOVX nucleic acid, or mutation content of NOVX genes in an individual can be determined to thereby select appropriate agent(s) for therapeutic or prophylactic treatment of the individual. In addition, pharmacogenetic studies can be used to apply genotyping of polymorphic alleles encoding drug-metabolizing enzymes to the identification of an individual's drug responsiveness phenotype. This knowledge, when applied to dosing or drug selection, can avoid adverse reactions or therapeutic failure and thus enhance therapeutic or prophylactic efficiency when treating a subject with a NOVX modulator, such as a modulator identified by one of the exemplary screening assays described herein.

[0267] Monitoring of Effects During Clinical Trials

[0268] Monitoring the influence of agents (e.g., drugs, compounds) on the expression or activity of NOVX (e.g., the ability to modulate aberrant cell proliferation and/or differentiation) can be applied not only in basic drug screening, but also in clinical trials. For example, the effectiveness of an agent determined by a screening assay as described herein can be monitored in clinical trails utilizing the same or similar assay. In such clinical trials, the expression or activity of NOVX and, preferably, other genes that have been implicated in, for example, a cellular proliferation or immune disorder can be used as a “read out” or markers of the immune responsiveness of a particular cell.

[0269] By way of example, and not of limitation, genes, including NOVX, that are modulated in cells by treatment with an agent (e.g., compound, drug or small molecule, e.g., identified in a screening assay as described herein) can be identified and/or quantified by Northern blot analysis or RT-PCR, as described herein, or alternatively by measuring the amount of protein produced, by one of the methods as described herein, or by measuring the levels of activity of NOVX or other genes. In this manner, the gene expression pattern can serve as a marker, indicative of the physiological response of the cells to the agent.

[0270] In one embodiment, the invention provides a method for monitoring the effectiveness of treatment of a subject with an agent (e.g., an agonist, antagonist, protein, peptide, peptidomimetic, nucleic acid, small molecule, or other drug candidate identified by the screening assays described herein) comprising the steps of (i) obtaining a pre-administration sample from a subject prior to administration of the agent; (ii) detecting the level of expression of a NOVX protein, mRNA, or genomic DNA in the preadministration sample; (iii) obtaining one or more post-administration samples from the subject; (iv) detecting the level of expression or activity of the NOVX protein, mRNA, or genomic DNA in the post-administration samples; (v) comparing the level of expression or activity of the NOVX protein, mRNA, or genomic DNA in the pre-administration sample with the NOVX protein, mRNA, or genomic DNA in the post administration sample or samples; and (vi) altering the administration of the agent to the subject accordingly.

[0271] Methods of Treatment

[0272] The invention provides for both prophylactic and therapeutic methods of treating a subject at risk of (or susceptible to) a disorder or having a disorder associated with aberrant NOVX expression or activity.

[0273] Diseases and Disorders

[0274] Diseases and disorders that are characterized by increased (relative to a subject not suffering from the disease or disorder) levels or biological activity may be treated with Therapeutics that antagonize (i.e., reduce or inhibit) activity. Therapeutics that antagonize activity may be administered in a therapeutic or prophylactic manner. Therapeutics that may be utilized include, but are not limited to: (i) an aforementioned peptide, or analogs, derivatives, fragments or homologs thereof; (ii) antibodies to an aforementioned peptide; (iii) nucleic acids encoding an aforementioned peptide; (iv) administration of antisense nucleic acid and nucleic acids that are “dysfunctional” (i.e., due to a heterologous insertion within the coding sequences of coding sequences to an aforementioned peptide) that are utilized to “knockout” endogenous function of an aforementioned peptide by homologous recombination (e.g., Science 244: 1288-1292, 1989); or (v) modulators (i.e., inhibitors, agonists and antagonists, including additional peptide mimetic of the invention or antibodies specific to a peptide of the invention) that alter the interaction between an aforementioned peptide and its binding partner.

[0275] Diseases and disorders that are characterized by decreased (relative to a subject not suffering from the disease or disorder) levels or biological activity may be treated with Therapeutics that increase (i.e., are agonists to) activity. Therapeutics that upregulate activity may be administered in a therapeutic or prophylactic manner. Therapeutics that may be utilized include, but are not limited to, an aforementioned peptide, or analogs, derivatives, fragments or homologs thereof; or an agonist that increases bioavailability.

[0276] Increased or decreased levels can be readily detected by quantifying peptide and/or RNA, by obtaining a patient tissue sample (e.g., from biopsy tissue) and assaying it in vitro for RNA or peptide levels, structure and/or activity of the expressed peptides (or mRNAs of an aforementioned peptide). Methods that are well-known within the art include, but are not limited to, immunoassays (e.g., by Western blot analysis, immunoprecipitation followed by sodium dodecyl sulfate (SDS) polyacrylamide gel electrophoresis, immunocytochemistry, etc.) and/or hybridization assays to detect expression of mRNAs (e.g., Northern assays, dot blots, in situ hybridization, and the like).

[0277] Prophylactic Methods

[0278] In one aspect, the invention provides a method for preventing, in a subject, a disease or condition associated with an aberrant NOVX expression or activity, by administering to the subject an agent that modulates NOVX expression or at least one NOVX activity. Subjects at risk for a disease that is caused or contributed to by aberrant NOVX expression or activity can be identified by, for example, any or a combination of diagnostic or prognostic assays as described herein. Administration of a prophylactic agent can occur prior to the manifestation of symptoms characteristic of the NOVX aberrancy, such that a disease or disorder is prevented or, alternatively, delayed in its progression. Depending upon the type of NOVX aberrancy, for example, a NOVX agonist or NOVX antagonist agent can be used for treating the subject. The appropriate agent can be determined based on screening assays described herein. The prophylactic methods of the invention are further discussed in the following subsections.

[0279] Therapeutic Methods

[0280] Another aspect of the invention pertains to methods of modulating NOVX expression or activity for therapeutic purposes. The modulatory method of the invention involves contacting a cell with an agent that modulates one or more of the activities of NOVX protein activity associated with the cell. An agent that modulates NOVX protein activity can be an agent as described herein, such as a nucleic acid or a protein, a naturally-occurring cognate ligand of a NOVX protein, a peptide, a NOVX peptidomimetic, or other small molecule. In one embodiment, the agent stimulates one or more NOVX protein activity. Examples of such stimulatory agents include active NOVX protein and a nucleic acid molecule encoding NOVX that has been introduced into the cell. In another embodiment, the agent inhibits one or more NOVX protein activity. Examples of such inhibitory agents include antisense NOVX nucleic acid molecules and anti-NOVX antibodies. These modulatory methods can be performed in vitro (e.g., by culturing the cell with the agent) or, alternatively, in vivo (e.g., by administering the agent to a subject). As such, the invention provides methods of treating an individual afflicted with a disease or disorder characterized by aberrant expression or activity of a NOVX protein or nucleic acid molecule. In one embodiment, the method involves administering an agent (e.g., an agent identified by a screening assay described herein), or combination of agents that modulates (e.g., up-regulates or down-regulates) NOVX expression or activity. In another embodiment, the method involves administering a NOVX protein or nucleic acid molecule as therapy to compensate for reduced or aberrant NOVX expression or activity.

[0281] Stimulation of NOVX activity is desirable in situations in which NOVX is abnormally downregulated and/or in which increased NOVX activity is likely to have a beneficial effect. One example of such a situation is where a subject has a disorder characterized by aberrant cell proliferation and/or differentiation (e.g., cancer or immune associated disorders). Another example of such a situation is where the subject has a gestational disease (e.g., preclampsia).

[0282] Determination of the Biological Effect of the Therapeutic

[0283] In various embodiments of the invention, suitable in vitro or in vivo assays are performed to determine the effect of a specific Therapeutic and whether its administration is indicated for treatment of the affected tissue.

[0284] In various specific embodiments, in vitro assays may be performed with representative cells of the type(s) involved in the patient's disorder, to determine if a given Therapeutic exerts the desired effect upon the cell type(s). Compounds for use in therapy may be tested in suitable animal model systems including, but not limited to rats, mice, chicken, cows, monkeys, rabbits, and the like, prior to testing in human subjects. Similarly, for in vivo testing, any of the animal model system known in the art may be used prior to administration to human subjects.

[0285] The invention will be further described in the following examples, which do not limit the scope of the invention described in the claims.

### EXAMPLES

### Example A

### Polynucleotide and Polypeptide Sequences, and Homology Data

### Example 1

### NOV1, CG101729: FGFR4 Variant

[0286] NOV1 of the present invention are novel proteins which bear sequence similarity to RIBOSOMAL PROTEIN S6 KINASE (RSK) ALPHA 1, nucleic acids that encode these proteins or fragments thereof, and antibodies that bind immunospecifically to these proteins. In one embodiment, a NOV1 gene encodes for a novel splice variant of ribosomal protein S6 kinase alpha 1 with 11 amino acid residues deleted resulting a shorter exon 10. Novel SNP variants are also provided.

[0287] The RSK family comprises growth factor-regulated serine/threonine kinases, known also as p90(rsk). Homologs of RSK exist in several species (Nature 384: 567-570, 1996). The highly conserved feature of all members of the RSK family is the presence of 2 nonidentical kinase catalytic domains. RSKs are implicated in the activation of the mitogen-activated kinase (MAPK) cascade and the stimulation of cell proliferation (at the transition between phases G0 and G1 of the cell cycle) and differentiation. The cloning and characterization of 3 genes encoding 3 isoforms of ribosomal protein S6 kinase (RSK): HU1 (RPS6KA1), HU2 (RPS6KA2), and HU3 (RPS6KA3) has been described (Am. J. Physiol. 266: C351-C359, 1994). The HU1 cDNA (GenBank L07597) encodes a predicted 735-amino acid protein containing 2 distinct consensus ATP-binding site sequences. Northern blot and RNase protection analyses detected an approximately 3.5-kb HU1 transcript in lymphocytes, skeletal muscle, liver, and adipose tissue. The RPS6KA1 gene has been mapped to chromosome 3.

[0288] A possible mechanism by which the RAS-MAPK signaling pathway mediates growth factor-dependent cell survival has been proposed (Science 286: 1358-1362, 1999). The MAP-activated kinases, the Rsks, catalyzed the phosphorylation of the proapoptotic protein BAD at ser 12 both in vitro and in vivo. The Rsk-induced phosphorylation of BAD at ser 12 suppressed BAD-mediated apoptosis in neurons. The Rsks are known to phosphorylate the transcription factor CREB at serl33. Activated CREB promoted cell survival, and inhibition of CREB phosphorylation at ser133 triggered apoptosis. It has been suggested that the MAP kinase signaling pathway promotes cell survival by a dual mechanism comprising the posttranslational modification and inactivation of a component of the cell death machinery and the increased transcription of prosurvival genes.

[0289] Xenopus laevis egg extracts immunodepleted of Rsk have been shown to loose their capacity to undergo mitotic arrest in response to activation of the Mos-MEK1-p42 MAPK cascade of protein kinases. Replenishing Rsk-depleted extracts with catalytically competent Rsk protein restored the ability of the extracts to undergo mitotic arrest. Rsk appears to be essential for cytostatic factor arrest (Science 286: 1362-1365, 1999). Whether cytostatic factor arrest is mediated by the protein kinase p90 Rsk, which is phosphorylated and activated by MAPK, has been investigated by expressing a constitutively activated form of Rsk in Xenopus embryos. Expression resulted in cleavage arrest. Rsk appeared to be the mediator of MAPK-dependent cytostatic factor arrest in vertebrate unfertilized eggs. Since Rsk expression did not activate the endogenous MAPK pathway, MAPK required no other substrate for induction of cytostatic factor arrest. Cytostatic factor arrest does not appear to be a consequence of direct regulation of the spindle assembly checkpoint or the anaphase-promoting complex by MAPK (Science 286: 1365-1367, 1999).

[0290] Mice deficient in S6 kinase-1 have been made (EMBO J. 17: 6649-6659, 1998) and were viable and fertile, but exhibit a conspicuous reduction in body size during embryogenesis, an effect that was mostly overcome by adulthood. Other mice deficient for S6 kinase-1, a known effector of the phosphatidylinositide-3-OH kinase signaling pathway, are hypoinsulinemic and glucose intolerant (Nature 408: 994-997, 2000). Whereas insulin resistance was not observed in isolated muscle, such mice exhibit a sharp reduction in glucose-induced insulin secretion and in pancreatic insulin content. This is not due to a lesion in glucose sensing or insulin production, but to a reduction in pancreatic endocrine mass, which is accounted for by a selective decrease in beta-cell size. It has been suggested that the observed phenotype closely parallels those of preclinical type II diabetes mellitus, in which malnutrition-induced hypoinsulinemia prediposes individuals to glucose intolerance.

[0291] The NOV1 family of novel nucleic acids and polypeptides clones includes NOV1 a through NOV1t, SEQ ID NOs: 1-40, and the nucleotide and encoded polypeptide sequences are shown in Table 1A. In a particular embodiment NOV1 nucleic acid sequence is SEQ ID NO:39, wherein each of residues X₁, X₂, X₅, X₆, X₈, X₉, X₁₀, X₁₄, X₁₇ is either C or T; and each of residues X₃, X₄, X₇, X₁₁, X₁₂, X₁₃, X₁₅, X₁₆, X₁₈ is either G or A. Nucleic acid sequence SEQ ID NO:39 encodes polypeptide SEQ ID NO:40, wherein residue Z₁ is S or F; Z₂ is C or R; Z₃ is A or T; Z₄ is Q or R; Z₅ is L or P; Z₆ is W or R; Z₇ is H or R; Z₈ is S or P; Z₉ is S or P; Z₁₀ is W or R; Z₁₁ is A or T; Z₁₂ is M or V; Z₁₃ is M or V or A; Z₁₄ is E or K; Z₁₅ is M or V; Z₁₆ is S or P; Z₁₇ is T or A; B₁ is L or S; B₂ is L or P; B₃ is K or E; B₄ is L or P; B₅ is V or D; and B₆ is L or P. Equivalent nucleic acid and polypeptide substitutions apply to other NOV1 sequences as would be appreciated by one of skill in the art, and are emcompassed in the present invention.

TABLE 1A
NOV1 Sequence Analysis

| | | |
|---|---|---|
| NOV1a, CG101729-02 | SEQ ID NO: 1 | 2383 bp |
| DNA Sequence | ORF Start: ATG at 17 | ORF Stop: end of sequence |

CACCAAGCTTCCCACCATGCGGCTGCTGCTGGCCCTGTTGGGGGTCCTGCTGAGTGTGCCTGGGCCTCCAGTC
TCGTCCCTGGAGGCCTCTGAGGAAGTGGAGCTTGAGCCCTGCCTGGCTCCCAGCCTGGAGCAGCAAGAGCAGG
AGCTGACAGTAGCCCTTGGGCAGCCTGTGCGGCTGTGCTGTGGGCGGGCTGAGCGTGGTGGCCACTGGTACAA
GGAGGGCAGTCGCCTGGCACCTGCTGGCCGTGTACGGGGCTGGAGGGGCCGCCTAGAGATTGCCAGCTTCCTA
CCTGAGGATGCTGGCCGCTACCTCTGCCCGGCACGAGGCTCCATGATCGTCCTGCAGAATCTCACCTTGATTA
CAGGTGACTCCTTGACCTCCAGCAACGATGATGAGGACCCCGAGTCCCATAGGGACCTCTCGAATAGGCACAG
TTACCCCCAGCAAGCACCCTACTGGACACACCCCCAGCGCATGGAGAAGAAACTGCATGCAGTACCTGCGGGG
AACACCGTCAAGTTCCGCTGTCCAGCTGCAGGCAACCCCACGCCCACCATCCGCTGGCTTAAGGATGGACAGG
CCTTTCATGGGGAGAACCGCATTGGAGGCATTCGGCTGCGCCATCAGCACTGGAGTCTCGTGATGGAGAGCGT
GGTGCCCTCGGACCGCGGCACATACACCTGCCTGGTAGAGAACGCTGTGGGCAGCATCCGTTATAACTACCTG
CTAGATGTGCTGGAGCGGTCCCCGCACCGGCCCATCCTGCAGGCCGGGCTCCCGGCCAACACCACAGCCGTGG
TGGGCAGCGACGTGGAGCTGCTGTGCAAGGTGTACAGCGATGCCCAGCCCCACATCCAGTGGCTGAAGCACAT
CGTCATCAACGGCAGCAGCTTCGGAGCCGACGGTTTCCCCTATGTGCAAGTCCTAAAGACTGCAGACATCAAT
AGCTCAGAGGTGGAGGTCCTGTACCTGCGGAACGTGTCAGCCGAGGACGCAGGCGAGTACACCTGCCTCGCAG
GCAATTCCATCGGCCTCTCCTACCAGTCTGCCTGGCTCACGGTGCTGCCAGTGCGAGGGCAGAGGAGGACCCC
ACATGGACCGCAGCAGCGCCCGAGGCCAGGTATACGGACATCATCCTGTACGCGTCGGGCTCCCTGGCCTTGG
CTGTGCTCCTGCTGCTGGCCGGGCTGTATCGAGGGCAGGCGCTCCACGGCCGGCACCCCCGCCCGCCCGCCAC
TGTGCAGAAGCTCTCCCGCTTCCCTCTGGCCCGACAGTTCTCCCTGGAGTCAGGCTCTTCCGGCAAGTCAAGC
TCATCCCTGGTACGAGGCGTGCGTCTCTCCTCCAGCGGCCCCGCCTTGCTCGCCGGCCTCGCTGGTGCTTGGG
AAGCCCCTAGGCGAGGGCTGCTTTGGCCAGGTAGTACGTGCAGAGGCCTTTGGCATGGACCCTGCCCGGCCTG
ACCAAGCCAGCACTGTGGCCGTCAAGATGCTCAAAGACAACGCCTCTGACAAGGACCTGGCCGACCTGGTCTC
GGAGATGGAGGTGATGAAGCTGATCGGCCGACACAAGAACATCATCAACCTGCTTGGTGTCTGCACCCAGGAA
GGGCCCCTGTACGTGATCGTGGAGTGCGCCGCCAAGGGAAACCTGCGGGAGTTCCTGCGGGCCCGGCGCCCCC
CAGGCCCCGACCTCAGCCCCGACGGTCCTCGGAGCAGTGAGGGGCCGCTCTCCTTCCCAGTCCTGGTCTCCTG
CGCCTACCAGGTGGCCCGAGGCATGCAGTATCTGGAGTCCCGGAAGTGTATCCACCGGGACCTGGCTGCCCGC
AATGTGCTGGTGACTGAGGACAATGTGATGAAGATTGCTGACTTTGGGCTGGCCCGCGGCGTCCACCACATTG
ACTACTATAAGAAAACCAGCAACGGCCGCCTGCCTGTGAAGTGGATGGCGCCCGAGGCCTTGTTTGACCGGGT
GTACACACACCAGAGTGACGTGTGGTCTTTTGGGATCCCGCTATGGGAGATCTTCACCCTCGGGGGCTCCCCG
TATCCTGGCATCCCGGTGGAGGAGCTGTTCTCGCTGCTGCGGGAGGGACATCGGATGGACCGACCCCCACACT
GCCCCCCAGAGCTGTACGGGCTGATGCGTGAGTGCTGGCACGCAGCGCCCTCCCAGAGGCCTACCTTCAAGCA
GCTGGTGGAGGCGCTGGACAAGGTCCTGCTGGCCGTCTCTGAGGAGTACCTCGACCTCCGCCTGACCTTCGGA
CCCTATTCCCCCTCTGGTGGGGACGCCAGCAGCACCTGCTCCTCCAGCGATTCTGTCTTCAGCCACGACCCCC
TGCCATTGGGATCCAGCTCCTTCCCCTTCGGGTCTGGGGTGCAGACA

| | | | |
|---|---|---|---|
| NOV1a, CG101729-02 | | | |
| Protein Sequence | SEQ ID NO: 2 | 789 aa | MW at 86629.6kD |

MRLLLALLGVLLSVPGPPVSSLEASEEVELEPCLAPSLEQQEQELTVALGQPVRLCCGRAERGGHWYKEGSRL
APAGRVRGWRGRLEIASFLPEDAGRYLCPARGSMIVLQNLTLITGDSLTSSNDDEDPESHRDLSNRHSYPQQA
PYWTHPQRMEKKLHAVPAGNTVKFRCPAAGNPTPTIRWLKDGQAFHGENRIGGIRLRHQHWSLVMESVVPSDR
GTYTCLVENAVGSIRYNYLLDVLERSPHRPILQAGLPANTTAVVGSDVELLCKVYSDAQPHIQWLKHIVINGS
SFGADGFPYVQVLKTADINSSEVEVLYLRNVSAEDAGEYTCLAGNSIGLSYQSAWLTVLPVRGQRRTPHGPQQ
RPRPGIRTSSCTRRAPWPWLCSCCWPGCIEGRRSTAGTPARPPLCRSSPASLWPDSSPWSQALPASQAHPWYE
ACVSPPAAPPCSPASLVLGKPLGEGCFGQVVRAEAFGMDPARPDQASTVAVKMLKDNASDKDLADLVSEMEVM
KLIGRHKNIINLLGVCTQEGPLYVIVECAAKGNLREFLRARRPPGPDLSPDGPRSSEGPLSFPVLVSCAYQVA
RGMQYLESRKCIHRDLAARNVLVTEDNVMKIADFGLARGVHHIDYYKKTSNGRLPVKWMAPEALFDRVYTHQS
DVWSFGIPLWEIFTLGGSPYPGIPVEELFSLLREGHRMDRPPHCPPELYGLMRECWHAAPSQRPTFKQLVEAL
DKVLLAVSEEYLDLRLTFGPYSPSGGDASSTCSSSDSVFSHDPLPLGSSSFPFGSGVQT

| | | |
|---|---|---|
| NOV1b, SNP 13374536 | SEQ ID NO: 3 | 2383 bp |
| DNA Sequence | ORF Start: ATG at 17 | ORF Stop: end of sequence |

CACCAAGCTTCCCACCATGCGGCTGCTGCTGGCCCTGTTGGGGGTCCTGCTGAGTGTGCCTGGGCCTCCAGTC
TCGTCCCTGGAGGCCTCTGAGGAAGTGGAGCTTGAGCCCTGCCTGGCTCCCAGCCTGGAGCAGCAAGAGCAGG
AGCTGACAGTAGCCCTTGGGCAGCCTGTGCGGCTGTGCTGTGGGCGGGCTGAGCGTGGTGGCCACTGGTACAA
GGAGGGCAGTCGCCTGGCACCTGCTGGCCGTGTACGGGGCTGGAGGGGCCGCCTAGAGATTGCCAGCTTCCTA
CCTGAGGATGCTGGCCGCTACCTCTGCCCGGCACGAGGCTCCATGATCGTCCTGCAGAATCTCACCTTGATTA
CAGGTGACTCCTTGACCTCCAGCAACGATGATGAGGACCCCGAGTCCCATAGGGACCTCTCGAATAGGCACAG
TTACCCCCAGCAAGCACCCTACTGGACACACCCCCAGCGCATGGAGAAGAAACTGCATGCAGTACCTGCGGGG
AACACCGTCAAGTTCCGCTGTCCAGCTGCAGGCAACCCCACGCCCACCATCCGCTGGCTTAAGGATGGACAGG
CCTTTCATGGGGAGAACCGCATTGGAGGCATTCGGCTGCGCCATCAGCACTGGAGTCTCGTGATGGAGAGCGT
GGTGCCCTCGGACCGCGGCACATACACCTGCCTGGTAGAGAACGCTGTGGGCAGCATCCGTTATAACTACCTG
CTAGATGTGCTGGAGCGGTCCCCGCACCGGCCCATCCTGCAGGCCGGGCTCCCGGCCAACACCACAGCCGTGG
TGGGCAGCGACGTGGAGCTGCTGTGCAAGGTGTACAGCGATGCCCAGCCCCACATCCAGTGGCTGAAGCACAT
CGTCATCAACGGCAGCAGCTTCGGAGCCGACGGTTTCCCCTATGTGCAAGTCCTAAAGACTGCAGACATCAAT
AGCTCAGAGGTGGAGGTCCTGTACCTGCGGAACGTGTCAGCCGAGGACGCAGGCGAGTACACCTGCCTCGCAG
GCAATTCCATCGGCCTCTCCTACCAGTCTGCCTGGCTCACGGTGCTGCCAGTGCGAGGGCAGAGGAGGACCCC
ACATGGACCGCAGCAGCGCCCGAGGCCAGGTATACGGACATCATCCTGTACGCGTCGGGCTCCCTGGCCTTGG
CTGTGCTCCTGCTGCTGGCCGGGCTGTATCGAGGGCAGGCGCTCCACGGCCGGCACCCCCGCCCGCCCGCCAC
TGTGCAGAAGCTCTCCCGCTTCCCTCTGGCCCGACAGTTCTCCCTGGAGTCAGGCTCTTCCGGCAAGTCAAGC
TCATCCCTGGTACGAGGCGTGCGTCTCTCCTCCAGCGGCCCCGCCTTGCTCGCCGGCCTCGCTGGTGCTTGGG
AAGCCCCTAGGCGAGGGCTGCTTTGGCCAGGTAGTACGTGCAGAGGCCTTTGGCGTGGACCCTGCCCGGCCTG
ACCAAGCCAGCACTGTGGCCGTCAAGATGCTCAAAGACAACGCCTCTGACAAGGACCTGGCCGACCTGGTCTC
GGAGATGGAGGTGATGAAGCTGATCGGCCGACACAAGAACATCATCAACCTGCTTGGTGTCTGCACCCAGGAA
GGGCCCCTGTACGTGATCGTGGAGTGCGCCGCCAAGGGAAACCTGCGGGAGTTCCTGCGGGCCCGGCGCCCCC
CAGGCCCCGACCTCAGCCCCGACGGTCCTCGGAGCAGTGAGGGGCCGCTCTCCTTCCCAGTCCTGGTCTCCTG
CGCCTACCAGGTGGCCCGAGGCATGCAGTATCTGGAGTCCCGGAAGTGTATCCACCGGGACCTGGCTGCCCGC
AATGTGCTGGTGACTGAGGACAATGTGATGAAGATTGCTGACTTTGGGCTGGCCCGCGGCGTCCACCACATTG
ACTACTATAAGAAAACCAGCAACGGCCGCCTGCCTGTGAAGTGGATGGCGCCCGAGGCCTTGTTTGACCGGGT
GTACACACACCAGAGTGACGTGTGGTCTTTTGGGATCCCGCTATGGGAGATCTTCACCCTCGGGGGCTCCCCG
TATCCTGGCATCCCGGTGGAGGAGCTGTTCTCGCTGCTGCGGGAGGGACATCGGATGGACCGACCCCCACACT
GCCCCCCAGAGCTGTACGGGCTGATGCGTGAGTGCTGGCACGCAGCGCCCTCCCAGAGGCCTACCTTCAAGCA
GCTGGTGGAGGCGCTGGACAAGGTCCTGCTGGCCGTCTCTGAGGAGTACCTCGACCTCCGCCTGACCTTCGGA
CCCTATTCCCCCTCTGGTGGGGACGCCAGCAGCACCTGCTCCTCCAGCGATTCTGTCTTCAGCCACGACCCCC
TGCCATTGGGATCCAGCTCCTTCCCCTTCGGGTCTGGGGTGCAGACA

| | | | |
|---|---|---|---|
| NOV1b, SNP 13374536 | | | |
| Protein sequence | SEQ ID NO: 4 | 789 aa | MW at 86597.6kD |

MRLLLALLGVLLSVPGPPVSSLEASEEVELEPCLAPSLEQQEQELTVALGQPVRLCCGRAERGGHWYKEGSRL
APAGRVRGWRGRLEIASFLPEDAGRYLCPARGSMIVLQNLTLITGDSLTSSNDDEDPESHRDLSNRHSYPQQA
PYWTHPQRMEKKLHAVPAGNTVKFRCPAAGNPTPTIRWLKDGQAFHGENRIGGIRLRHQHWSLVMESVVPSDR
GTYTCLVENAVGSIRYNYLLDVLERSPHRPILQAGLPANTTAVVGSDVELLCKVYSDAQPHIQWLKHIVINGS
SFGADGFPYVQVLKTADINSSEVEVLYLRNVSAEDAGEYTCLAGNSIGLSYQSAWLTVLPVRGQRRTPHGPQQ
RPRPGIRTSSCTRRAPWPWLCSCCWPGCIEGRRSTAGTPARPPLCRSSPASLWPDSSPWSQALPASQAHPWYE
ACVSPPAAPPCSPASLVLGKPLGEGCFGQVVRAEAFGVDPARPDQASTVAVKMLKDNASDKDLADLVSEMEVM
KLIGRHKNIINLLGVCTQEGPLYVTVECAAKGNLREFLRARRPPGPDLSPDGPRSSEGPLSFPVLVSCAYQVA
RGMQYLESRKCIHRDLAARNVLVTEDNVMKIADFGLARGVHHIDYYKKTSNGRLPVKWMAPEALFDRVYTHQS
DVWSFGIPLWEIFTLGGSPYPGIPVEELFSLLREGHRMDRPPHCPPELYGLMRECWHAAPSQRPTFKQLVEAL
DKVLLAVSEEYLDLRLTFGPYSPSGGDASSTCSSSDSVFSHDPLPLGSSSFPFGSGVQT

| | | |
|---|---|---|
| NOV1c, SNP 13374538 | SEQ ID NO: 5 | 2383 bp |
| DNA Sequence | ORF Start: ATG at 17 | ORF Stop: end of sequence |

CACCAAGCTTCCCACCATGCGGCTGCTGCTGGCCCTGTTGGGGGTCCTGCTGAGTGTGCCTGGGCCTCCAGTC
TCGTCCCTGGAGGCCTCTGAGGAAGTGGAGCTTGAGCCCTGCCTGGCTCCCAGCCTGGAGCAGCAAGAGCAGG
AGCTGACAGTAGCCCTTGGGCAGCCTGTGCGGCTGTGCTGTGGGCGGGCTGAGCGTGGTGGCCACTGGTACAA
GGAGGGCAGTCGCCTGGCACCTGCTGGCCGTGTACGGGGCTGGAGGGGCCGCCTAGAGATTGCCAGCTTCCTA
CCTGAGGATGCTGGCCGCTACCTCTGCCCGGCACGAGGCTCCATGATCGTCCTGCAGAATCTCACCTTGATTA
CAGGTGACTCCTTGACCTCCAGCAACGATGATGAGGACCCCGAGTCCCATAGGGACCTCTCGAATAGGCACAG
TTACCCCCAGCAAGCACCCTACTGGACACACCCCCAGCGCATGGAGAAGAAACTGCATGCAGTACCTGCGGGG
AACACCGTCAAGTTCCGCTGTCCAGCTGCAGGCAACCCCACGCCCACCATCCGCTGGCTTAAGGATGGACAGG
CCTTTCATGGGGAGAACCGCATTGGAGGCATTCGGCTGCGCCATCAGCACTGGAGTCTCGTGATGGAGAGCGT
GGTGCCCTCGGACCGCGGCACATACACCTGCCTGGTAGAGAACGCTGTGGGCAGCATCCGTTATAACTACCTG
CTAGATGTGCTGGAGCGGTCCCCGCACCGGCCCATCCTGCAGGCCGGGCTCCCGGCCAACACCACAGCCGTGG
TGGGCAGCGACGTGGAGCTGCTGTGCAAGGTGTACAGCGATGCCCAGCCCCACATCCAGTGGCTGAAGCGCAT
CGTCATCAACGGCAGCAGCTTCGGAGCCGACGGTTTCCCCTATGTGCAAGTCCTAAAGACTGCAGACATCAAT
AGCTCAGAGGTGGAGGTCCTGTACCTGCGGAACGTGTCAGCCGAGGACGCAGGCGAGTACACCTGCCTCGCAG
GCAATTCCATCGGCCTCTCCTACCAGTCTGCCTGGCTCACGGTGCTGCCAGTGCGAGGGCAGAGGAGGACCCC
ACATGGACCGCAGCAGCGCCCGAGGCCAGGTATACGGACATCATCCTGTACGCGTCGGGCTCCCTGGCCTTGG
CTGTGCTCCTGCTGCTGGCCGGGCTGTATCGAGGGCAGGCGCTCCACGGCCGGCACCCCCGCCCGCCCGCCAC
TGTGCAGAAGCTCTCCCGCTTCCCTCTGGCCCGACAGTTCTCCCTGGAGTCAGGCTCTTCCGGCAAGTCAAGC
TCATCCCTGGTACGAGGCGTGCGTCTCTCCTCCAGCGGCCCCGCCTTGCTCGCCGGCCTCGCTGGTGCTTGGG
AAGCCCCTAGGCGAGGGCTGCTTTGGCCAGGTAGTACGTGCAGAGGCCTTTGGCATGGACCCTGCCCGGCCTG
ACCAAGCCAGCACTGTGGCCGTCAAAGATGCTCAAGACAACGCCTCTGACAAGGACCTGGCCGACCTGGTCTC
GGAGATGGAGGTGATGAAGCTGATCGGCCGACACAAGAACATCATCAACCTGCTTGGTGTCTGCACCCAGGAA
GGGCCCCTGTACGTGATCGTGGAGTGCGCCGCCAAGGGAAACCTGCGGGAGTTCCTGCGGGCCCGGCGCCCCC
CAGGCCCCGACCTCAGCCCCGACGGTCCTCGGAGCAGTGAGGGGCCGCTCTCCTTCCCAGTCCTGGTCTCCTG
CGCCTACCAGGTGGCCCGAGGCATGCAGTATCTGGAGTCCCGGAAGTGTATCCACCGGGACCTGGCTGCCCGC
AATGTGCTGGTGACTGAGGACAATGTGATGAAGATTGCTGACTTTGGGCTGGCCCGCGGCGTCCACCACATTG
ACTACTATAAGAAAACCAGCAACGGCCGCCTGCCTGTGAAGTGGATGGCGCCCGAGGCCTTGTTTGACCGGGT
GTACACACACCAGAGTGACGTGTGGTCTTTTGGGATCCCGCTATGGGAGATCTTCACCCTCGGGGGCTCCCCG
TATCCTGGCATCCCGGTGGAGGAGCTGTTCTCGCTGCTGCGGGAGGGACATCGGATGGACCGACCCCCACACT
GCCCCCCAGAGCTGTACGGGCTGATGCGTGAGTGCTGGCACGCAGCGCCCTCCCAGAGGCCTACCTTCAAGCA
GCTGGTGGAGGCGCTGGACAAGGTCCTGCTGGCCGTCTCTGAGGAGTACCTCGACCTCCGCCTGACCTTCGGA
CCCTATTCCCCCTCTGGTGGGGACGCCAGCAGCACCTGCTCCTCCAGCGATTCTGTCTTCAGCCACGACCCCC
TGCCATTGGGATCCAGCTCCTTCCCCTTCGGGTCTGGGGTGCAGACA

| | | | |
|---|---|---|---|
| NOV1c, SNP 13374538 | | | |
| Protein Sequence | SEQ ID NO: 6 | 789 aa | MW at 86648.7kD |

MRLLLALLGVLLSVPGPPVSSLEASEEVELEPCLAPSLEQQEQELTVALGQPVRLCCGRAERGGHWYKEGSRL
APAGRVRGWRGRLEIASFLPEDAGRYLCPARGSMIVLQNLTLITGDSLTSSNDDEDPESHRDLSNRHSYPQQA
PYWTHPQRMEKKLHAVPAGNTVKFRCPAAGNPTPTIRWLKDGQAFHGENRIGGIRLRHQHWSLVMESVVPSDR
GTYTCLVENAVGSIRYNYLLDVLERSPHRPILQAGLPANTTAVVGSDVELLCKVYSDAQPHIQWLKRIVINGS
SFGADGFPYVQVLKTADINSSEVEVLYLRNVSAEDAGEYTCLAGNSIGLSYQSAWLTVLPVRGQRRTPHGPQQ
RPRPGIRTSSCTRRAPWPWLCSCCWPGCIEGRRSTAGTPARPPLCRSSPASLWPDSSPWSQALPASQAHPWYE
ACVSPPAAPPCSPASLVLGKPLGEGCFGQVVRAEAFGMDPARPDQASTVAVKMLKDNASDKDLADLVSEMEVM
KLIGRHKNIINLLGVCTQEGPLYVIVECAAKGNLREFLRARRPPGPDLSPDGPRSSEGPLSFPVLVSCAYQVA
RGMQYLESRKCIHRDLAARNVLVTEDNVMKIADFGLARGVHHIDYYKKTSNGRLPVKWMAPEALFDRVYTHQS
DVWSFGIPLWEIFTLGGSPYPGIPVEELFSLLREGHRMDRPPHCPPELYGLMRECWHAAPSQRPTFKQLVEAL
DKVLLAVSEEYLDLRLTFGPYSPSGGDASSTCSSSDSVFSHDPLPLGSSSFPFGSGVQT

| | | |
|---|---|---|
| NOV1d, SNP 13375033 | SEQ ID NO: 7 | 2383 bp |
| DNA Sequence | ORF Start: ATG at 17 | ORF Stop: end of sequence |

CACCAAGCTTCCCACCATGCGGCTGCTGCTGGCCCTGTTGGGGGTCCTGCTGAGTGTGCCTGGGCCTCCAGTC
TCGTCCCTGGAGGCCTCTGAGGAAGTGGAGCTTGAGCCCTGCCTGGCTCCCAGCCTGGAGCAGCAAGAGCAGG
AGCTGACAGTAGCCCTTGGGCAGCCTGTGCGGCTGTGCTGTGGGCGGGCTGAGCGTGGTGGCCACTGGTACAA
GGAGGGCAGTCGCCTGGCACCTGCTGGCCGTGTACGGGGCTGGAGGGGCCGCCTAGAGATTGCCAGCTTCCTA
CCTGAGGATGCTGGCCGCTACCTCTGCCCGGCACGAGGCTCCATGATCGTCCTGCAGAATCTCACCTTGATTA
CAGGTGACTCCTTGACCTCCAGCAACGATGATGAGGACCCCGAGTCCCATAGGGACCTCTCGAATAGGCACAG
TTACCCCCAGCAAGCACCCTACTGGACACACCCCCAGCGCATGGAGAAGAAACTGCATGCAGTACCTGCGGGG
AACACCGTCAAGTTCCGCTGTCCAGCTGCAGGCAACCCCACGCCCACCATCCGCTGGCTTAAGGATGGACAGG
CCTTTCATGGGGAGAACCGCATTGGAGGCATTCGGCTGCGCCATCAGCACTGGAGTCTCGTGATGGAGAGCGT
GGTGCCCTCGGACCGCGGCACATACACCTGCCTGGTAGAGAACGCTGTGGGCAGCATCCGTTATAACTACCTG
CTAGATGTGCTGGAGCGGTCCCCGCACCGGCCCATCCTGCAGGCCGGGCTCCCGGCCAACACCACAGCCGTGG
TGGGCAGCGACGTGGAGCTGCTGTGCAAGGTGTACAGCGATGCCCAGCCCCACATCCAGCGGCTGAAGCACAT
CGTCATCAACGGCAGCAGCTTCGGAGCCGACGGTTTCCCCTATGTGCAAGTCCTAAAGACTGCAGACATCAAT
AGCTCAGAGGTGGAGGTCCTGTACCTGCGGAACGTGTCAGCCGAGGACGCAGGCGAGTACACCTGCCTCGCAG
GCAATTCCATCGGCCTCTCCTACCAGTCTGCCTGGCTCACGGTGCTGCCAGTGCGAGGGCAGAGGAGGACCCC
ACATGGACCGCAGCAGCGCCCGAGGCCAGGTATACGGACATCATCCTGTACGCGTCGGGCTCCCTGGCCTTGG
CTGTGCTCCTGCTGCTGGCCGGGCTGTATCGAGGGCAGGCGCTCCACGGCCGGCACCCCCGCCCGCCCGCCAC
TGTGCAGAAGCTCTCCCGCTTCCCTCTGGCCCGACAGTTCTCCCTGGAGTCAGGCTCTTCCGGCAAGTCAAGC
TCATCCCTGGTACGAGGCGTGCGTCTCTCCTCCAGCGGCCCCGCCTTGCTCGCCGGCCTCGCTGGTGCTTGGG
AAGCCCCTAGGCGAGGGCTGCTTTGGCCAGGTAGTACGTGCAGAGGCCTTTGGCATGGACCCTGCCCGGCCTG
ACCAAGCCAGCACTGTGGCCGTCAAGATGCTCAAAGACAACGCCTCTGACAAGGACCTGGCCGACCTGGTCTC
GGAGATGGAGGTGATGAAGCTGATCGGCCGACACAAGAACATCATCAACCTGCTTGGTGTCTGCACCCAGGAA
GGGCCCCTGTACGTGATCGTGGAGTGCGCCGCCAAGGGAAACCTGCGGGAGTTCCTGCGGGCCCGGCGCCCCC
CAGGCCCCGACCTCAGCCCCGACGGTCCTCGGAGCAGTGAGGGGCCGCTCTCCTTCCCAGTCCTGGTCTCCTG
CGCCTACCAGGTGGCCCGAGGCATGCAGTATCTGGAGTCCCGGAAGTGTATCCACCGGGACCTGGCTGCCCGC
AATGTGCTGGTGACTGAGGACAATGTGATGAAGATTGCTGACTTTGGGCTGGCCCGCGGCGTCCACCACATTG
ACTACTATAAGAAAACCAGCAACGGCCGCCTGCCTGTGAAGTGGATGGCGCCCGAGGCCTTGTTTGACCGGGT
GTACACACACCAGAGTGACGTGTGGTCTTTTGGGATCCCGCTATGGGAGATCTTCACCCTCGGGGGCTCCCCG
TATCCTGGCATCCCGGTGGAGGAGCTGTTCTCGCTGCTGCGGGAGGGACATCGGATGGACCGACCCCCACACT
GCCCCCCAGAGCTGTACGGGCTGATGCGTGAGTGCTGGCACGCAGCGCCCTCCCAGAGGCCTACCTTCAAGCA
GCTGGTGGAGGCGCTGGACAAGGTCCTGCTGGCCGTCTCTGAGGAGTACCTCGACCTCCGCCTGACCTTCGGA
CCCTATTCCCCCTCTGGTGGGGACGCCAGCAGCACCTGCTCCTCCAGCGATTCTGTCTTCAGCCACGACCCCC
TGCCATTGGGATCCAGCTCCTTCCCCTTCGGGTCTGGGGTGCAGACA

| | | | |
|---|---|---|---|
| NOV1d, SNP 13375033 | | | |
| Protein Sequence | SEQ ID NO: 8 | 789 aa | MW at 86599.6kD |

MRLLLALLGVLLSVPGPPVSSLEASEEVELEPCLAPSLEQQEQELTVALGQPVRLCCGRAERGGHWYKEGSRL
APAGRVRGWRGRLEIASFLPEDAGRYLCPARGSMIVLQNLTLITGDSLTSSNDDEDPESHRDLSNRHSYPQQA
PYWTHPQRMEKKLHAVPAGNTVKFRCPAAGNPTPTIRWLKDGQAFHGENRIGGIRLRHQHWSLVMESVVPSDR
GTYTCLVENAVGSIRYNYLLDVLERSPHRPILQAGLPANTTAVVGSDVELLCKVYSDAQPHIQRLKHIVINGS
SFGADGFPYVQVLKTADINSSEVEVLYLRNVSAEDAGEYTCLAGNSIGLSYQSAWLTVLPVRGQRRTPHGPQQ
RPRPGIRTSSCTRPAPWPWLCSCCWPGCIEGRRSTAGTPARPPLCRSSPASLWPDSSPWSQALPASQAHPWYE
ACVSPPAAPPCSPASLVLGKPLGEGCFGQVVRAEAFGMDPARPDQASTVAVKMLKDNASDKDLADLVSEMEVM
KLTGRHKNIINLLGVCTQEGPLYVIVECAAKGNLREFLRARRPPGPDLSPDGPRSSEGPLSFPVLVSCAYQVA
RGMQYLESRKCIHRDLAARNVLVTEDNVMKIADFGLARGVHHIDYYKKTSNGRLPVKWMAPEALFDRVYTHQS
DVWSFGIPLWEIFTLGGSPYPGIPVEELFSLLREGHRMDRPPHCPPELYGLMRECWHAAPSQRPTFKQLVEAL
DKVLLAVSEEYLDLRLTFGPYSPSGGDASSTCSSSDSVFSHDPLPLGSSSFPFGSGVQT

| | | |
|---|---|---|
| NOV1e, SNP 13375034 | SEQ ID NO: 9 | 2383 bp |
| DNA Sequence | ORF Start: ATG at 17 | ORF Stop: end of sequence |

CACCAAGCTTCCCACCATGCGGCTGCTGCTGGCCCTGTTGGGGGTCCTGCTGAGTGTGCCTGGGCCTCCAGTC
TCGTCCCTGGAGGCCTCTGAGGAAGTGGAGCTTGAGCCCTGCCTGGCTCCCAGCCTGGAGCAGCAAGAGCAGG
AGCTGACAGTAGCCCTTGGGCAGCCTGTGCGGCTGTGCTGTGGGCGGGCTGAGCGTGGTGGCCACTGGTACAA
GGAGGGCAGTCGCCTGGCACCTGCTGGCCGTGTACGGGGCTGGAGGGGCCGCCTAGAGATTGCCAGCTTCCTA
CCTGAGGATGCTGGCCGCTACCTCTGCCCGGCACGAGGCTCCATGATCGTCCTGCAGAATCTCACCTTGATTA
CAGGTGACTCCTTGACCTCCAGCAACGATGATGAGGACCCCGAGTCCCATAGGGACCTCTCGAATAGGCACAG
TTACCCCCAGCAAGCACCCTACTGGACACACCCCCAGCGCATGGAGAAGAAACTGCATGCAGTACCTGCGGGG
AACACCGTCAAGTTCCGCTGTCCAGCTGCAGGCAACCCCACGCCCACCATCCGCTGGCTTAAGGATGGACAGG
CCTTTCATGGGGAGAACCGCATTGGAGGCATTCGGCTGCGCCATCAGCACTGGAGTCTCGTGATGGAGAGCGT
GGTGCCCTCGGACCGCGGCACATACACCTGCCTGGTAGAGAACGCTGTGGGCAGCATCCGTTATAACTACCTG
CTAGATGTGCTGGAGCGGTCCCCGCACCGGCCCATCCTGCAGGCCGGGCTCCCGGCCAACACCACAGCCGTGG
TGGGCAGCGACGTGGAGCTGCTGTGCAAGGTGTACAGCGATGCCCAGCCCCACATCCAGTGGCTGAAGCACAT
CGTCATCAACGGCAGCAGCTTCGGAGCCGACGGTTTCCCCTATGTGCAAGTCCTAAAGACTGCAGACATCAAT
AGCTCAGAGGTGGAGGTCCTGTACCTGCGGAACGTGTCAGCCGAGGACGCAGGCGAGTACACCTGCCTCGCAG
GCAATTCCATCGGCCTCTCCTACCAGTCTGCCTGGCTCACGGTGCTGCCAGTGCGAGGGCAGAGGAGGACCCC
ACATGGACCGCAGCAGCGCCCGAGGCCAGGTATACGGACATCATCCTGTACGCGTCGGGCTCCCTGGCCTTGG
CTGTGCTCCTGCTGCTGGCCGGGCTGTATCGAGGGCAGGCGCTCCACGGCCGGCACCCCCGCCCGCCCGCCAC
TGTGCAGAAGCTCTCCCGCTCCCCTCTGGCCCGACAGTTCTCCCTGGAGTCAGGCTCTTCCGGCAAGTCAAGC
TCATCCCTGGTACGAGGCGTGCGTCTCTCCTCCAGCGGCCCCGCCTTGCTCGCCGGCCTCGCTGGTGCTTGGG
AAGCCCCTAGGCGAGGGCTGCTTTGGCCAGGTAGTACGTGCAGAGGCCTTTGGCATGGACCCTGCCCGGCCTG
ACCAAGCCAGCACTGTGGCCGTCAAGATGCTCAAAGACAACGCCTCTGACAAGGACCTGGCCGACCTGGTCTC
GGAGATGGAGGTGATGAAGCTGATCGGCCGACACAAGAACATCATCAACCTGCTTGGTGTCTGCACCCAGGAA
GGGCCCCTGTACGTGATCGTGGAGTGCGCCGCCAAGGGAAACCTGCGGGAGTTCCTGCGGGCCCGGCGCCCCC
CAGGCCCCGACCTCAGCCCCGACGGTCCTCGGAGCAGTGAGGGGCCGCTCTCCTTCCCAGTCCTGGTCTCCTG
CGCCTACCAGGTGGCCCGAGGCATGCAGTATCTGGAGTCCCGGAAGTGTATCCACCGGGACCTGGCTGCCCGC
AATGTGCTGGTGACTGAGGACAATGTGATGAAGATTGCTGACTTTGGGCTGGCCCGCGGCGTCCACCACATTG
ACTACTATAAGAAAACCAGCAACGGCCGCCTGCCTGTGAAGTGGATGGCGCCCGAGGCCTTGTTTGACCGGGT
GTACACACACCAGAGTGACGTGTGGTCTTTTGGGATCCCGCTATGGGAGATCTTCACCCTCGGGGGCTCCCCG
TATCCTGGCATCCCGGTGGAGGAGCTGTTCTCGCTGCTGCGGGAGGGACATCGGATGGACCGACCCCCACACT
GCCCCCCAGAGCTGTACGGGCTGATGCGTGAGTGCTGGCACGCAGCGCCCTCCCAGAGGCCTACCTTCAAGCA
GCTGGTGGAGGCGCTGGACAAGGTCCTGCTGGCCGTCTCTGAGGAGTACCTCGACCTCCGCCTGACCTTCGGA
CCCTATTCCCCCTCTGGTGGGGACGCCAGCAGCACCTGCTCCTCCAGCGATTCTGTCTTCAGCCACGACCCCC
TGCCATTGGGATCCAGCTCCTTCCCCTTCGGGTCTGGGGTGCAGACA

| | | | |
|---|---|---|---|
| NOV1e, SNP 13375034 | | | |
| Protein Sequence | SEQ ID NO: 10 | 789 aa | MW at 86639.7kD |

MRLLLALLGVLLSVPGPPVSSLEASEEVELEPCLAPSLEQQEQELTVALGQPVRLCCGPAERGGHWYKEGSRL
APAGRVRGWRGRLEIASFLPEDAGRYLCPAPGSMIVLQNLTLITGDSLTSSNDDEDPESHRDLSNRHSYPQQA
PYWTHPQRMEKKLHAVPAGNTVKFRCPAAGNPTPTIRWLKDGQAFHGENRIGGIRLRHQHWSLVMESVVPSDR
GTYTCLVENAVGSIRYNYLLDVLERSPHRPILQAGLPANTTAVVGSDVELLCKVYSDAQPHIQWLKHTVINGS
SFGADGFPYVQVLKTADINSSEVEVLYLRNVSAEDAGEYTCLAGNSIGLSYQSAWLTVLPVRGQRRTPHGPQQ
RPRPGIRTSSCTRRAPWPWLCSCCWPGCIEGRRSTAGTPARPPLCRSSPAPLWPDSSPWSQALPASQAHPWYE
ACVSPPAAPPCSPASLVLGKPLGEGCFGQVVRAEAFGMDPARPDQASTVAVKMLKDNASDKDLADLVSEMEVM
KLIGRHKNIINLLGVCTQEGPLYVIVECAAKGNLREFLRARRPPGPDLSPDGPRSSEGPLSFPVLVSCAYQVA
RGMQYLESRKCIHRDLAARNVLVTEDNVMKIADFGLARGVHHIDYYKKTSNGRLPVKWMAPEALFDRVYTHQS
DVWSFGIPLWEIFTLGGSPYPGIPVEELFSLLREGHRMDRPPHCPPELYGLMRECWHAAPSQRPTFKQLVEAL
DKVLLAVSEEYLDLRLTFGPYSPSGGDASSTCSSSDSVFSHDPLPLGSSSFPFGSGVQT

| | | |
|---|---|---|
| NOV1f, SNP 13375035 | SEQ ID NO: 11 | 2383 bp |
| DNA Sequence | ORF Start: ATG at 17 | ORF Stop: end of sequence |

CACCAAGCTTCCCACCATGCGGCTGCTGCTGGCCCTGTTGGGGGTCCTGCTGAGTGTGCCTGGGCCTCCAGTC
TCGTCCCTGGAGGCCTCTGAGGAAGTGGAGCTTGAGCCCCGCCTGGCTCCCAGCCTGGAGCAGCAAGAGCAGG
AGCTGACAGTAGCCCTTGGGCAGCCTGTGCGGCTGTGCTGTGGGCGGGCTGAGCGTGGTGGCCACTGGTACAA
GGAGGGCAGTCGCCTGGCACCTGCTGGCCGTGTACGGGGCTGGAGGGGCCGCCTAGAGATTGCCAGCTTCCTA
CCTGAGGATGCTGGCCGCTACCTCTGCCCGGCACGAGGCTCCATGATCGTCCTGCAGAATCTCACCTTGATTA
CAGGTGACTCCTTGACCTCCAGCAACGATGATGAGGACCCCGAGTCCCATAGGGACCTCTCGAATAGGCACAG
TTACCCCCAGCAAGCACCCTACTGGACACACCCCCAGCGCATGGAGAAGAAACTGCATGCAGTACCTGCGGGG
AACACCGTCAAGTTCCGCTGTCCAGCTGCAGGCAACCCCACGCCCACCATCCGCTGGCTTAAGGATGGACAGG
CCTTTCATGGGGAGAACCGCATTGGAGGCATTCGGCTGCGCCATCAGCACTGGAGTCTCGTGATGGAGAGCGT
GGTGCCCTCGGACCGCGGCACATACACCTGCCTGGTAGAGAACGCTGTGGGCAGCATCCGTTATAACTACCTG
CTAGATGTGCTGGAGCGGTCCCCGCACCGGCCCATCCTGCAGGCCGGGCTCCCGGCCAACACCACAGCCGTGG
TGGGCAGCGACGTGGAGCTGCTGTGCAAGGTGTACAGCGATGCCCAGCCCCACATCCAGTGGCTGAAGCACAT
CGTCATCAACGGCAGCAGCTTCGGAGCCGACGGTTTCCCCTATGTGCAAGTCCTAAAGACTGCAGACATCAAT
AGCTCAGAGGTGGAGGTCCTGTACCTGCGGAACGTGTCAGCCGAGGACGCAGGCGAGTACACCTGCCTCGCAG
GCAATTCCATCGGCCTCTCCTACCAGTCTGCCTGGCTCACGGTGCTGCCAGTGCGAGGGCAGAGGAGGACCCC
ACATGGACCGCAGCAGCGCCCGAGGCCAGGTATACGGACATCATCCTGTACGCGTCGGGCTCCCTGGCCTTGG
CTGTGCTCCTGCTGCTGGCCGGGCTGTATCGAGGGCAGGCGCTCCACGGCCGGCACCCCCGCCCGCCCGCCAC
TGTGCAGAAGCTCTCCCGCTTCCCTCTGGCCCGACAGTTCTCCCTGGAGTCAGGCTCTTCCGGCAAGTCAAGC
TCATCCCTGGTACGAGGCGTGCGTCTCTCCTCCAGCGGCCCCGCCTTGCTCGCCGGCCTCGCTGGTGCTTGGG
AAGCCCCTAGGCGAGGGCTGCTTTGGCCAGGTAGTACGTGCAGAGGCCTTTGGCATGGACCCTGCCCGGCCTG
ACCAAGCCAGCACTGTGGCCGTCAAGATGCTCAAAGACAACGCCTCTGACAAGGACCTGGCCGACCTGGTCTC
GGAGATGGAGGTGATGAAGCTGATCGGCCGACACAAGAACATCATCAACCTGCTTGGTGTCTGCACCCAGGAA
GGGCCCCTGTACGTGATCGTGGAGTGCGCCGCCAAGGGAAACCTGCGGGAGTTCCTGCGGGCCCGGCGCCCCC
CAGGCCCCGACCTCAGCCCCGACGGTCCTCGGAGCAGTGAGGGGCCGCTCTCCTTCCCAGTCCTGGTCTCCTG
CGCCTACCAGGTGGCCCGAGGCATGCAGTATCTGGAGTCCCGGAAGTGTATCCACCGGGACCTGGCTGCCCGC
AATGTGCTGGTGACTGAGGACAATGTGATGAAGATTGCTGACTTTGGGCTGGCCCGCGGCGTCCACCACATTG
ACTACTATAAGAAAACCAGCAACGGCCGCCTGCCTGTGAAGTGGATGGCGCCCGAGGCCTTGTTTGACCGGGT
GTACACACACCAGAGTGACGTGTGGTCTTTTGGGATCCCGCTATGGGAGATCTTCACCCTCGGGGGCTCCCCG
TATCCTGGCATCCCGGTGGAGGAGCTGTTCTCGCTGCTGCGGGAGGGACATCGGATGGACCGACCCCCACACT
GCCCCCCAGAGCTGTACGGGCTGATGCGTGAGTGCTGGCACGCAGCGCCCTCCCAGAGGCCTACCTTCAAGCA
GCTGGTGGAGGCGCTGGACAAGGTCCTGCTGGCCGTCTCTGAGGAGTACCTCGACCTCCGCCTGACCTTCGGA
CCCTATTCCCCCTCTGGTGGGGACGCCAGCAGCACCTGCTCCTCCAGCGATTCTGTCTTCAGCCACGACCCCC
TGCCATTGGGATCCAGCTCCTTCCCCTTCGGGTCTGGGGTGCAGACA

| | | | |
|---|---|---|---|
| NOV1f, SNP 13375035 | | | |
| Protein Sequence | SEQ ID NO: 12 | 789 aa | MW at 86682.7kD |

MRLLLALLGVLLSVPGPPVSSLEASEEVELEPRLAPSLEQQEQELTVALGQPVRLCCGRAERGGHWYKEGSRL
APAGRVRGWRGRLEIASFLPEDAGRYLCPARGSMIVLQNLTLITGDSLTSSNDDEDPESHRDLSNRHSYPQQA
PYWTHPQRMEKKLHAVPAGNTVKFRCPAAGNPTPTIRWLKDGQAFHGENRIGGIRLRHQHWSLVMESVVPSDR
GTYTCLVENAVGSIRYNYLLDVLERSPHRPILQAGLPANTTAVVGSDVELLCKVYSDAQPHIQWLKHIVINGS
SFGADGFPYVQVLKTADINSSEVEVLYLRNVSAEDAGEYTCLAGNSIGLSYQSAWLTVLPVRGQRRTPHGPQQ
RPRPGIRTSSCTRRAPWPWLCSCCWPGCIEGRRSTAGTPARPPLCRSSPASLWPDSSPWSQALPASQAHPWYE
ACVSPPAAPPCSPASLVLGKPLGEGCFGQVVRAEAFGMDPARPDQASTVAVKMLKDNASDKDLADLVSEMEVM
KLIGRHKNIINLLGVCTQEGPLYVIVECAAKGNLREFLRARRPPGPDLSPDGPRSSEGPLSFPVLVSCAYQVA
RGMQYLESRKCIHRDLAARNVLVTEDNVMKIADFGLARGVHHIDYYKKTSNGRLPVKWMAPEALFDRVYTHQS
DVWSFGIPLWEIFTLGGSPYPGIPVEELFSLLREGHRMDRPPHCPPELYGLMRECWHAAPSQRPTFKQLVEAL
DKVLLAVSEEYLDLRLTFGPYSPSGGDASSTCSSSDSVFSHDPLPLGSSSFPFGSGVQT

| | | |
|---|---|---|
| NOV1g, SNP 13375036 | SEQ ID NO: 13 | 2383 bp |
| DNA Sequence | ORF Start: ATG at 17 | ORF Stop: end of sequence |

CACCAAGCTTCCCACCATGCGGCTGCTGCTGGCCCTGTTGGGGGTCCTGCTGAGTGTGCCTGGGCCTCCAGTC
TCGTCCCTGGAGGCCTCTGAGGAAGTGGAGCTTGAGCCCTGCCTGGCTCCCAGCCTGGAGCAGCAAGAGCAGG
AGCTGACAGTAGCCCTTGGGCAGCCTGTGCGGCTGTGCTGTGGGCGGGCTGAGCGTGGTGGCCACTGGTACAA
GGAGGGCAGTCGCCTGACACCTGCTGGCCGTGTACGGGGCTGGAGGGGCCGCCTAGAGATTGCCAGCTTCCTA
CCTGAGGATGCTGGCCGCTACCTCTGCCCGGCACGAGGCTCCATGATCGTCCTGCAGAATCTCACCTTGATTA
CAGGTGACTCCTTGACCTCCAGCAACGATGATGAGGACCCCGAGTCCCATAGGGACCTCTCGAATAGGCACAG
TTACCCCCAGCAAGCACCCTACTGGACACACCCCCAGCGCATGGAGAAGAAACTGCATGCAGTACCTGCGGGG
AACACCGTCAAGTTCCGCTGTCCAGCTGCAGGCAACCCCACGCCCACCATCCGCTGGCTTAAGGATGGACAGG
CCTTTCATGGGGAGAACCGCATTGGAGGCATTCGGCTGCGCCATCAGCACTGGAGTCTCGTGATGGAGAGCGT
GGTGCCCTCGGACCGCGGCACATACACCTGCCTGGTAGAGAACGCTGTGGGCAGCATCCGTTATAACTACCTG
CTAGATGTGCTGGAGCGGTCCCCGCACCGGCCCATCCTGCAGGCCGGGCTCCCGGCCAACACCACAGCCGTGG
TGGGCAGCGACGTGGAGCTGCTGTGCAAGGTGTACAGCGATGCCCAGCCCCACATCCAGTGGCTGAAGCACAT
CGTCATCAACGGCAGCAGCTTCGGAGCCGACGGTTTCCCCTATGTGCAAGTCCTAAAGACTGCAGACATCAAT
AGCTCAGAGGTGGAGGTCCTGTACCTGCGGAACGTGTCAGCCGAGGACGCAGGCGAGTACACCTGCCTCGCAG
GCAATTCCATCGGCCTCTCCTACCAGTCTGCCTGGCTCACGGTGCTGCCAGTGCGAGGGCAGAGGAGGACCCC
ACATGGACCGCAGCAGCGCCCGAGGCCAGGTATACGGACATCATCCTGTACGCGTCGGGCTCCCTGGCCTTGG
CTGTGCTCCTGCTGCTGGCCGGGCTGTATCGAGGGCAGGCGCTCCACGGCCGGCACCCCCGCCCGCCCGCCAC
TGTGCAGAAGCTCTCCCGCTTCCCTCTGGCCCGACAGTTCTCCCTGGAGTCAGGCTCTTCCGGCAAGTCAAGC
TCATCCCTGGTACGAGGCGTGCGTCTCTCCTCCAGCGGCCCCGCCTTGCTCGCCGGCCTCGCTGGTGCTTGGG
AAGCCCCTAGGCGAGGGCTGCTTTGGCCAGGTAGTACGTGCAGAGGCCTTTGGCATGGACCCTGCCCGGCCTG
ACCAAGCCAGCACTGTGGCCGTCAAGATGCTCAAAGACAACGCCTCTGACAAGGACCTGGCCGACCTGGTCTC
GGAGATGGAGGTGATGAAGCTGATCGGCCGACACAAGAACATCATCAACCTGCTTGGTGTCTGCACCCAGGAA
GGGCCCCTGTACGTGATCGTGGAGTGCGCCGCCAAGGGAAACCTGCGGGAGTTCCTGCGGGCCCGGCGCCCCC
CAGGCCCCGACCTCAGCCCCGACGGTCCTCGGAGCAGTGAGGGGCCGCTCTCCTTCCCAGTCCTGGTCTCCTG
CGCCTACCAGGTGGCCCGAGGCATGCAGTATCTGGAGTCCCGGAAGTGTATCCACCGGGACCTGGCTGCCCGC
AATGTGCTGGTGACTGAGGACAATGTGATGAAGATTGCTGACTTTGGGCTGGCCCGCGGCGTCCACCACATTG
ACTACTATAAGAAAACCAGCAACGGCCGCCTGCCTGTGAAGTGGATGGCGCCCGAGGCCTTGTTTGACCGGGT
GTACACACACCAGAGTGACGTGTGGTCTTTTGGGATCCCGCTATGGGAGATCTTCACCCTCGGGGGCTCCCCG
TATCCTGGCATCCCGGTGGAGGAGCTGTTCTCGCTGCTGCGGGAGGGACATCGGATGGACCGACCCCCACACT
GCCCCCCAGAGCTGTACGGGCTGATGCGTGAGTGCTGGCACGCAGCGCCCTCCCAGAGGCCTACCTTCAAGCA
GCTGGTGGAGGCGCTGGACAAGGTCCTGCTGGCCGTCTCTGAGGAGTACCTCGACCTCCGCCTGACCTTCGGA
CCCTATTCCCCCTCTGGTGGGGACGCCAGCAGCACCTGCTCCTCCAGCGATTCTGTCTTCAGCCACGACCCCC
TGCCATTGGGATCCAGCTCCTTCCCCTTCGGGTCTGGGGTGCAGACA

| | | | |
|---|---|---|---|
| NOV1g, SNP 13375036 | | | |
| Protein Sequence | SEQ ID NO: 14 | 789 aa | MW at 86659.7kD |

MRLLLALLGVLLSVPGPPVSSLEASEEVELEPCLAPSLEQQEQELTVALGQPVRLCCGRAERGGHWYKEGSRL
TPAGRVRGWRGRLEIASFLPEDAGRYLCPARGSMIVLQNLTLITGDSLTSSNDDEDPESHRDLSNRHSYPQQA
PYWTHPQRMEKKLHAVPAGNTVKFRCPAAGNPTPTIRWLKDGQAFHGENRIGGIRLRHQHWSLVMESVVPSDR
GTYTCLVENAVGSIRYNYLLDVLERSPHRPILQAGLPANTTAVVGSDVELLCKVYSDAQPHIQWLKHIVINGS
SFGADGFPYVQVLKTADINSSEVEVLYLRNVSAEDAGEYTCLAGNSIGLSYQSAWLTVLPVRGQRRTPHGPQQ
RPRPGIRTSSCTRRAPWPWLCSCCWPGCIEGRRSTAGTPARPPLCRSSPASLWPDSSPWSQALPASQAHPWYE
ACVSPPAAPPCSPASLVLGKPLGEGCFGQVVRAEAFGMDPARPDQASTVAVKMLKDNASDKDLADLVSEMEVM
KLIGRHKNIINLLGVCTQEGPLYVIVECAAKGNLREFLRARRPPGPDLSPDGPRSSEGPLSFPVLVSCAYQVA
RGMQYLESRKCIHRDLAARNVLVTEDNVMKIADFGLARGVHHIDYYKKTSNGRLPVKWMAPEALFDRVYTHQS
DVWSFGIPLWEIFTLGGSPYPGIPVEELFSLLREGHRMDRPPHCPPELYGLMRECWHAAPSQRPTFKQLVEAL
DKVLLAVSEEYLDLRLTFGPYSPSGGDASSTCSSSDSVFSHDPLPLGSSSFPFGSGVQT

| | | |
|---|---|---|
| NOV1h, SNP 13375039 | SEQ ID NO: 15 | 2383 bp |
| DNA Sequence | ORF Start: ATG at 17 | ORF Stop: end of sequence |

CACCAAGCTTCCCACCATGCGGCTGCTGCTGGCCCTGTTGGGGGTCCTGCTGAGTGTGCCTGGGCCTCCAGTC
TCGTCCCTGGAGGCCTCTGAGGAAGTGGAGCTTGAGCCCTGCCTGGCTCCCAGCCTGGAGCAGCAAGAGCAGG
AGCTGACAGTAGCCCTTGGGCAGCCTGTGCGGCTGTGCTGTGGGCGGGCTGAGCGTGGTGGCCACTGGTACAA
GGAGGGCAGTCGCCTGGCACCTGCTGGCCGTGTACGGGGCTGGAGGGGCCGCCTAGAGATTGCCAGCTTCCTA
CCTGAGGATGCTGGCCGCTACCTCTGCCCGGCACGAGGCTCCATGATCGTCCTGCAGAATCTCACCTTGATTA
CAGGTGACTCCTTGACCTCCAGCAACGATGATGAGGACCCCGAGTCCCATAGGGACCTCTCGAATAGGCACAG
TTACCCCCAGCAAGCACCCTACTGGACACACCCCCAGCGCATGGAGAAGAAACTGCATGCAGTACCTGCGGGG
AACACCGTCAAGTTCCGCTGTCCAGCTGCAGGCAACCCCACGCCCACCATCCGCTGGCTTAAGGATGGACAGG
CCTTTCATGGGGAGAACCGCATTGGAGGCATTCGGCTGCGCCATCAGCACTGGAGTCTCGTGATGGAGAGCGT
GGTGCCCTCGGACCGCGGCACATACACCTGCCTGGTAGAGAACGCTGTGGGCAGCATCCGTTATAACTACCTG
CTAGATGTGCTGGAGCGGTCCCCGCACCGGCCCATCCTGCAGGCCGGGCTCCCGGCCAACACCACAGCCGTGG
TGGGCAGCGACGTGGAGCTGCTGTGCAAGGTGTACAGCGATGCCCAGCCCCACATCCAGTGGCTGAAGCACAT
CGTCATCAACGGCAGCAGCTTCGGAGCCGACGGTTTCCCCTATGTGCAAGTCCTAAAGACTGCAGACATCAAT
AGCTCAGAGGTGGAGGTCCTGTACCTGCGGAACGTGTCAGCCGAGGACGCAGGCGAGTACACCTGCCTCGCAG
GCAATTCCATCGGCCTCTCCTACCAGTCTGCCTGGCTCACGGTGCTGCCAGTGCGAGGGCAGAGGAGGACCCC
ACATGGACCGCAGCAGCGCCCGAGGCCAGGTATACGGACATCATCCTGTACGCGTCGGGCTCCCTGGCCTTGG
CTGTGCTCCTGCTGCTGGCCGGGCTGTATCGAGGGCAGGCGCTCCACGGCCGGCACCCCCGCCCGCCCGCCAC
TGTGCAGAAGCTCTCCCGCTTCCCTCTGGCCCGACAGTTCTCCCTGGAGTCAGGCTCTTCCGGCAAGTCAAGC
TCATCCCTGGTACGAGGCGTGCGTCTCTCCTCCAGCGGCCCCGCCTTGCTCGCCGGCCTCGCTGGTGCTTGGG
AAGCCCCTAGGCGAGGGCTGCTTTGGCCAGGTAGTACGTGCAGAGGCCTTTGGCATGGACCCTGCCCGGCCTG
ACCAAGCCAGCACTGTGGCCGTCAAGATGCTCAAAGACAACGCCTCTGACAAGGACCTGGCCGACCTGGTCTC
GGAGATGGAGGTGATGAAGCTGATCGGCCGACACAAGAACATCATCAACCTGCTTGGTGTCTGCACCCAGGAA
GGGCCCCTGTACGTGATCGTGGAGTGCGCCGCCAAGGGAAACCTGCGGGAGTTCCTGCGGGCCCGGCGCCCCC
CAGGCCCCGACCTCAGCCCCGACGGTCCTCGGAGCAGTGAGGGGCCGCTCTCCTTCCCAGTCCTGGTCTCCTG
CGCCTACCAGGTGGCCCGAGGCGTGCAGTATCTGGAGTCCCGGAAGTGTATCCACCGGGACCTGGCTGCCCGC
AATGTGCTGGTGACTGAGGACAATGTGATGAAGATTGCTGACTTTGGGCTGGCCCGCGGCGTCCACCACATTG
ACTACTATAAGAAAACCAGCAACGGCCGCCTGCCTGTGAAGTGGATGGCGCCCGAGGCCTTGTTTGACCGGGT
GTACACACACCAGAGTGACGTGTGGTCTTTTGGGATCCCGCTATGGGAGATCTTCACCCTCGGGGGCTCCCCG
TATCCTGGCATCCCGGTGGAGGAGCTGTTCTCGCTGCTGCGGGAGGGACATCGGATGGACCGACCCCCACACT
GCCCCCCAGAGCTGTACGGGCTGATGCGTGAGTGCTGGCACGCAGCGCCCTCCCAGAGGCCTACCTTCAAGCA
GCTGGTGGAGGCGCTGGACAAGGTCCTGCTGGCCGTCTCTGAGGAGTACCTCGACCTCCGCCTGACCTTCGGA
CCCTATTCCCCCTCTGGTGGGGACGCCAGCAGCACCTGCTCCTCCAGCGATTCTGTCTTCAGCCACGACCCCC
TGCCATTGGGATCCAGCTCCTTCCCCTTCGGGTCTGGGGTGCAGACA

| | | | |
|---|---|---|---|
| NOV1h, SNP 13375039 | | | |
| Protein sequence | SEQ ID NO: 16 | 789 aa | MW at 86597.6kD |

MRLLLALLGVLLSVPGPPVSSLEASEEVELEPCLAPSLEQQEQELTVALGQPVRLCCGRAERGGHWYKEGSRL
APAGRVRGWRGRLEIASFLPEDAGRYLCPARGSMIVLQNLTLITGDSLTSSNDDEDPESHRDLSNRHSYPQQA
PYWTHPQRMEKKLHAVPAGNTVKFRCPAAGNPTPTIRWLKDGQAFHGENRIGGIRLRHQHWSLVMESVVPSDR
GTYTCLVENAVGSIRYNYLLDVLERSPHRPILQAGLPANTTAVVGSDVELLCKVYSDAQPHIQWLKHIVINGS
SFGADGFPYVQVLKTADINSSEVEVLYLRNVSAEDAGEYTCLAGNSIGLSYQSAWLTVLPVRGQRRTPHGPQQ
RPRPGIRTSSCTRRAPWPWLCSCCWPGCIEGRRSTAGTPARPPLCRSSPASLWPDSSPWSQALPASQAHPWYE
ACVSPPAAPPCSPASLVLGKPLGEGCFGQVVRAEAFGVDPARPDQASTVAVKMLKDNASDKDLADLVSEMEVM
KLIGRHKNIINLLGVCTQEGPLYVTVECAAKGNLREFLRARRPPGPDLSPDGPRSSEGPLSFPVLVSCAYQVA
RGMQYLESRKCIHRDLAARNVLVTEDNVMKIADFGLARGVHHIDYYKKTSNGRLPVKWMAPEALFDRVYTHQS
DVWSFGIPLWEIFTLGGSPYPGIPVEELFSLLREGHRMDRPPHCPPELYGLMRECWHAAPSQRPTFKQLVEAL
DKVLLAVSEEYLDLRLTFGPYSPSGGDASSTCSSSDSVFSHDPLPLGSSSFPFGSGVQT

| | | |
|---|---|---|
| NOV1i, SNP 13375041 | SEQ ID NO: 17 | 2383 bp |
| DNA Sequence | ORF Start: ATG at 17 | ORF Stop: end of sequence |

CACCAAGCTTCCCACCATGCGGCTGCTGCTGGCCCTGTTGGGGGTCCTGCTGAGTGTGCCTGGGCCTCCAGTC
TCGTCCCTGGAGGCCTCTGAGGAAGTGGAGCTTGAGCCCTGCCTGGCTCCCAGCCTGGAGCAGCAAGAGCAGG
AGCTGACAGTAGCCCTTGGGCAGCCTGTGCGGCTGTGCTGTGGGCGGGCTGAGCGTGGTGGCCACTGGTACAA
GGAGGGCAGTCGCCTGGCACCTGCTGGCCGTGTACGGGGCTGGAGGGGCCGCCTAGAGATTGCCAGCTTCCTA
CCTGAGGATGCTGGCCGCTACCTCTGCCCGGCACGAGGCTCCATGATCGTCCTGCAGAATCTCACCTTGATTA
CAGGTGACTCCTTGACCTCCAGCAACGATGATGAGGACCCCGAGTCCCATAGGGACCTCTCGAATAGGCACAG
TTACCCCCAGCAAGCACCCTACTGGACACACCCCCAGCGCATGGAGAAGAAACTGCATGCAGTACCTGCGGGG
AACACCGTCAAGTTCCGCTGTCCAGCTGCAGGCAACCCCACGCCCACCATCCGCTGGCTTAAGGATGGACAGG
CCTTTCATGGGGAGAACCGCATTGGAGGCATTCGGCTGCGCCATCAGCACTGGAGTCTCGTGATGGAGAGCGT
GGTGCCCTCGGACCGCGGCACATACACCTGCCTGGTAGAGAACGCTGTGGGCAGCATCCGTTATAACTACCTG
CTAGATGTGCTGGAGCGGTCCCCGCACCGGCCCATCCTGCAGGCCGGGCTCCCGGCCAACACCACAGCCGTGG
TGGGCAGCGACGTGGAGCTGCTGTGCAAGGTGTACAGCGATGCCCAGCCCCACATCCAGTGGCTGAAGCACAT
CGTCATCAACGGCAGCAGCTTCGGAGCCGACGGTTTCCCCTATGTGCAAGTCCTAAAGACTGCAGACATCAAT
AGCTCAGAGGTGGAGGTCCTGTACCTGCGGAACGTGTCAGCCGAGGACGCAGGCGAGTACACCTGCCTCGCAG
GCAATTCCATCGGCCTCTCCTACCAGTCTGCCTGGCTCACGGTGCTGCCAGTGCGAGGGCAGAGGAGGACCCC
ACATGGACCGCAGCAGCGCCCGAGGCCAGGTATACGGACATCATCCTGTACGCGTCGGGCTCCCTGGCCTTGG
CTGTGCTCCTGCTGCTGGCCGGGCTGTATCGAGGGCAGGCGCTCCACGGCCGGCACCCCCGCCCGCCCGCCAC
TGTGCAGAAGCTCTCCCGCTTCCCTCTGGCCCGACAGTTCTCCCTGGAGTCAGGCTCTTCCGGCAAGTCAAGC
TCATCCCTGGTACGAGGCGTGCGTCTCTCCTCCAGCGGCCCCGCCTTGCTCGCCGGCCTCGCTGGTGCTTGGG
AAGCCCCTAGGCGAGGGCTGCTTTGGCCAGGTAGTACGTGCAGAGGCCTTTGGCATGGACCCTGCCCGGCCTG
ACCAAGCCAGCACTGTGGCCGTCAAGATGCTCAAAGACAACGCCTCTGACAAGGACCTGGCCGACCTGGTCTC
GGAGATGGAGGTGATGAAGCTGATCGGCCGACACAAGAACATCATCPACCTGCTTGGTGTCTGCACCCAGGAA
GGGCCCCTGTACGTGATCGTGAAGTGCGCCGCCAAGGGAAACCTGCGGGAGTTCCTGCGGGCCCGGCGCCCCC
CAGGCCCCGACCTCAGCCCCGACGGTCCTCGGAGCAGTGAGGGGCCGCTCTCCTTCCCAGTCCTGGTCTCCTG
CGCCTACCAGGTGGCCCGAGGCATGCAGTATCTGGAGTCCCGGAAGTGTATCCACCGGGACCTGGCTGCCCGC
AATGTGCTGGTGACTGAGGACAATGTGATGAAGATTGCTGACTTTGGGCTGGCCCGCGGCGTCCACCACATTG
ACTACTATAAGAAAACCAGCAACGGCCGCCTGCCTGTGAAGTGGATGGCGCCCGAGGCCTTGTTTGACCGGGT
GTACACACACCAGAGTGACGTGTGGTCTTTTGGGATCCCGCTATGGGAGATCTTCACCCTCGGGGGCTCCCCG
TATCCTGGCATCCCGGTGGAGGAGCTGTTCTCGCTGCTGCGGGAGGGACATCGGATGGACCGACCCCCACACT
GCCCCCCAGAGCTGTACGGGCTGATGCGTGAGTGCTGGCACGCAGCGCCCTCCCAGAGGCCTACCTTCAAGCA
GCTGGTGGAGGCGCTGGACAAGGTCCTGCTGGCCGTCTCTGAGGAGTACCTCGACCTCCGCCTGACCTTCGGA
CCCTATTCCCCCTCTGGTGGGGACGCCAGCAGCACCTGCTCCTCCAGCGATTCTGTCTTCAGCCACGACCCCC
TGCCATTGGGATCCAGCTCCTTCCCCTTCGGGTCTGGGGTGCAGACAGTCGACGGC

| | | | |
|---|---|---|---|
| NOV1i, SNP 13375041 | | | |
| Protein Sequence | SEQ ID NO: 18 | 789 aa | MW at 86628.7kD |

MRLLLALLGVLLSVPGPPVSSLEASEEVELEPCLAPSLEQQEQELTVALGQPVRLCCGRAERGGHWYKEGSRL
APAGRVRGWRGRLEIASFLPEDAGRYLCPARGSMIVLQNLTLITGDSLTSSNDDEDPESHRDLSNRHSYPQQA
PYWTHPQRMEKKLHAVPAGNTVKFRCPAAGNPTPTIRWLKDGQAFHGENRIGGIRLRHQHWSLVMESVVPSDR
GTYTCLVENAVGSIRYNYLLDVLERSPHRPILQAGLPANTTAVVGSDVELLCKVYSDAQPHIQWLKHIVINGS
SFGADGFPYVQVLKTADINSSEVEVLYLRNVSAEDAGEYTCLAGNSIGLSYQSAWLTVLPVRGQRRTPHGPQQ
RPRPGIRTSSCTRRAPWPWLCSCCWPGCIEGRRSTAGTPARPPLCRSSPASLWPDSSPWSQALPASQAHPWYE
ACVSPPAAPPCSPASLVLGKPLGEGCFGQVVRAEAFGVDPARPDQASTVAVKMLKDNASDKDLADLVSEMEVM
KLIGRHKNIINLLGVCTQEGPLYVTVECAAKGNLREFLRARRPPGPDLSPDGPRSSEGPLSFPVLVSCAYQVA
RGMQYLESRKCIHRDLAARNVLVTEDNVMKIADFGLARGVHHIDYYKKTSNGRLPVKWMAPEALFDRVYTHQS
DVWSFGIPLWEIFTLGGSPYPGIPVEELFSLLREGHRMDRPPHCPPELYGLMRECWHAAPSQRPTFKQLVEAL
DKVLLAVSEEYLDLRLTFGPYSPSGGDASSTCSSSDSVFSHDPLPLGSSSFPFGSGVQT

| | | |
|---|---|---|
| NOV1j, SNP 13375042 | SEQ ID NO: 19 | 2383 bp |
| DNA Sequence | ORF Start: ATG at 17 | ORF Stop: end of sequence |

CACCAAGCTTCCCACCATGCGGCTGCTGCTGGCCCTGTTGGGGGTCCTGCTGAGTGTGCCTGGGCCTCCAGTC
TCGTCCCTGGAGGCCTCTGAGGAAGTGGAGCTTGAGCCCTGCCTGGCTCCCAGCCTGGAGCAGCAAGAGCAGG
AGCTGACAGTAGCCCTTGGGCAGCCTGTGCGGCTGTGCTGTGGGCGGGCTGAGCGTGGTGGCCACTGGTACAA
GGAGGGCAGTCGCCTGGCACCTGCTGGCCGTGTACGGGGCTGGAGGGGCCGCCTAGAGATTGCCAGCTTCCTA
CCTGAGGATGCTGGCCGCTACCTCTGCCCGGCACGAGGCTCCATGATCGTCCTGCAGAATCTCACCTTGATTA
CAGGTGACTCCTTGACCTCCAGCAACGATGATGAGGACCCCGAGTCCCATAGGGACCTCTCGAATAGGCACAG
TTACCCCCAGCAAGCACCCTACTGGACACACCCCCAGCGCATGGAGAAGAAACTGCATGCAGTACCTGCGGGG
AACACCGTCAAGTTCCGCTGTCCAGCTGCAGGCAACCCCACGCCCACCATCCGCTGGCTTAAGGATGGACAGG
CCTTTCATGGGGAGAACCGCATTGGAGGCATTCGGCTGCGCCATCAGCACTGGAGTCTCGTGATGGAGAGCGT
GGTGCCCTCGGACCGCGGCACATACACCTGCCTGGTAGAGAACGCTGTGGGCAGCATCCGTTATAACTACCTG
CTAGATGTGCTGGAGCGGTCCCCGCACCGGCCCATCCTGCAGGCCGGGCTCCCGGCCAACACCACAGCCGTGG
TGGGCAGCGACGTGGAGCTGCTGTGCAAGGTGTACAGCGATGCCCAGCCCCACATCCAGTGGCTGAAGCACAT
CGTCATCAACGGCAGCAGCTTCGGAGCCGACGGTTTCCCCTATGTGCAAGTCCTAAAGACTGCAGACATCAAT
AGCTCAGAGGTGGAGGTCCTGTACCTGCGGAACGTGTCAGCCGAGGACGCAGGCGAGTACACCTGCCTCGCAG
GCAATTCCATCGGCCTCTCCTACCAGTCTGCCTGGCTCACGGTGCTGCCAGTGCGAGGGCAGAGGAGGACCCC
ACATGGACCGCAGCAGCGCCCGAGGCCAGGTATACGGACATCATCCTGTACGCGTCGGGCTCCCTGGCCTTGG
CTGTGCTCCTGCTGCTGGCCGGGCTGTATCGAGGGCAGGCGCTCCACGGCCGGCACCCCCGCCCGCCCGCCAC
TGTGCAGAAGCTCTCCCGCTTCCCTCTGGCCCGACAGTTCTCCCTGGAGTCAGGCTCTTCCGGCAAGTCAAGC
TCATCCCTGGTACGAGGCGTGCGTCTCTCCTCCAGCGGCCCCGCCTTGCTCGCCGGCCTCGCTGGTGCTTGGG
AAGCCCCTAGGCGAGGGCTGCTTTGGCCAGGTAGTACGTGCAGAGGCCTTTGGCATGGACCCTGCCCGGCCTG
ACCAAGCCAGCACTGTGGCCGTCAAGATGCTCAAAGACAACGCCTCTGACAAGGACCTGGCCGACCTGGTCTC
GGAGATGGAGGTGATGAAGCTGATCGGCCGACACAAGAACATCATCAACCTGCTTGGTGTCTGCACCCAGGAA
GGGCCCCTGTACGTGATCGCGGAGTGCGCCGCCAAGGGAAACCTGCGGGAGTTCCTGCGGGCCCGGCGCCCCC
CAGGCCCCGACCTCAGCCCCGACGGTCCTCGGAGCAGTGAGGGGCCGCTCTCCTTCCCAGTCCTGGTCTCCTG
CGCCTACCAGGTGGCCCGAGGCATGCAGTATCTGGAGTCCCGGAAGTGTATCCACCGGGACCTGGCTGCCCGC
AATGTGCTGGTGACTGAGGACAATGTGATGAAGATTGCTGACTTTGGGCTGGCCCGCGGCGTCCACCACATTG
ACTACTATAAGAAAACCAGCAACGGCCGCCTGCCTGTGAAGTGGATGGCGCCCGAGGCCTTGTTTGACCGGGT
GTACACACACCAGAGTGACGTGTGGTCTTTTGGGATCCCGCTATGGGAGATCTTCACCCTCGGGGGCTCCCCG
TATCCTGGCATCCCGGTGGAGGAGCTGTTCTCGCTGCTGCGGGAGGGACATCGGATGGACCGACCCCCACACT
GCCCCCCAGAGCTGTACGGGCTGATGCGTGAGTGCTGGCACGCAGCGCCCTCCCAGAGGCCTACCTTCAAGCA
GCTGGTGGAGGCGCTGGACAAGGTCCTGCTGGCCGTCTCTGAGGAGTACCTCGACCTCCGCCTGACCTTCGGA
CCCTATTCCCCCTCTGGTGGGGACGCCAGCAGCACCTGCTCCTCCAGCGATTCTGTCTTCAGCCACGACCCCC
TGCCATTGGGATCCAGCTCCTTCCCCTTCGGGTCTGGGGTGCAGACA

| | | | |
|---|---|---|---|
| NOV1j, SNP 13375042 | | | |
| Protein Sequence | SEQ ID NO: 20 | 789 aa | MW at 86601.6kD |

MRLLLALLGVLLSVPGPPVSSLEASEEVELEPCLAPSLEQQEQELTVALGQPVRLCCGRAERGGHWYKEGSRL
APAGRVRGWRGRLEIASFLPEDAGRYLCPARGSMIVLQNLTLITGDSLTSSNDDEDPESHRDLSNRHSYPQQA
PYWTHPQRMEKKLHAVPAGNTVKFRCPAAGNPTPTIRWLKDGQAFHGENRIGGIRLRHQHWSLVMESVVPSDR
GTYTCLVENAVGSIRYNYLLDVLERSPHRPILQAGLPANTTAVVGSDVELLCKVYSDAQPHIQWLKHIVINGS
SFGADGFPYVQVLKTADINSSEVEVLYLRNVSAEDAGEYTCLAGNSIGLSYQSAWLTVLPVRGQRRTPHGPQQ
RPRPGIRTSSCTRRAPWPWLCSCCWPGCIEGRRSTAGTPARPPLCRSSPASLWPDSSPWSQALPASQAHPWYE
ACVSPPAAPPCSPASLVLGKPLGEGCFGQVVRAEAFGVDPARPDQASTVAVKMLKDNASDKDLADLVSEMEVM
KLIGRHKNIINLLGVCTQEGPLYVTVECAAKGNLREFLRARRPPGPDLSPDGPRSSEGPLSFPVLVSCAYQVA
RGMQYLESRKCIHRDLAARNVLVTEDNVMKIADFGLARGVHHIDYYKKTSNGRLPVKWMAPEALFDRVYTHQS
DVWSFGIPLWEIFTLGGSPYPGIPVEELFSLLREGHRMDRPPHCPPELYGLMRECWHAAPSQRPTFKQLVEAL
DKVLLAVSEEYLDLRLTFGPYSPSGGDASSTCSSSDSVFSHDPLPLGSSSFPFGSGVQT

| | | |
|---|---|---|
| NOV1k, SNP 13375043 | SEQ ID NO: 21 | 2383 bp |
| DNA Sequence | ORF Start: ATG at 17 | ORF Stop: end of sequence |

CACCAAGCTTCCCACCATGCGGCTGCTGCTGGCCCTGTTGGGGGTCCTGCTGAGTGTGCCTGGGCCTCCAGTC
TCGTCCCTGGAGGCCTCTGAGGAAGTGGAGCTTGAGCCCTGCCTGGCTCCCAGCCTGGAGCAGCAAGAGCAGG
AGCTGACAGTAGCCCTTGGGCAGCCTGTGCGGCTGTGCTGTGGGCGGGCTGAGCGTGGTGGCCACTGGTACAA
GGAGGGCAGTCGCCTGGCACCTGCTGGCCGTGTACGGGGCTGGAGGGGCCGCCTAGAGATTGCCAGCTTCCTA
CCTGAGGATGCTGGCCGCTACCTCTGCCCGGCACGAGGCTCCATGATCGTCCTGCAGAATCTCACCTTGATTA
CAGGTGACTCCTTGACCTCCAGCAACGATGATGAGGACCCCGAGTCCCATAGGGACCTCTCGAATAGGCACAG
TTACCCCCAGCAAGCACCCTACTGGACACACCCCCAGCGCATGGAGAAGAAACTGCATGCAGTACCTGCGGGG
AACACCGTCAAGTTCCGCTGTCCAGCTGCAGGCAACCCCACGCCCACCATCCGCTGGCTTAAGGATGGACAGG
CCTTTCATGGGGAGAACCGCATTGGAGGCATTCGGCTGCGCCATCAGCACTGGAGTCTCGTGATGGAGAGCGT
GGTGCCCTCGGACCGCGGCACATACACCTGCCTGGTAGAGAACGCTGTGGGCAGCATCCGTTATAACTACCTG
CTAGATGTGCTGGAGCGGTCCCCGCACCGGCCCATCCTGCAGGCCGGGCTCCCGGCCAACACCACAGCCGTGG
TGGGCAGCGACGTGGAGCTGCTGTGCAAGGTGTACAGCGATGCCCAGCCCCACATCCAGTGGCTGAAGCACAT
CGTCATCAACGGCAGCAGCTTCGGAGCCGACGGTTTCCCCTATGTGCAAGTCCTAAAGACTGCAGACATCAAT
AGCTCAGAGGTGGAGGTCCTGTACCTGCGGAACGTGTCAGCCGAGGACGCAGGCGAGTACACCTGCCTCGCAG
GCAATTCCATCGGCCTCTCCTACCAGTCTGCCTGGCTCACGGTGCTGCCAGTGCGAGGGCAGAGGAGGACCCC
ACATGGACCGCAGCAGCGCCCGAGGCCAGGTATACGGACATCATCCTGTACGCGTCGGGCTCCCTGGCCTTGG
CTGTGCTCCTGCTGCTGGCCGGGCTGTATCGAGGGCAGGCGCTCCACGGCCGGCACCCCCGCCCGCCCGCCAC
TGTGCAGAAGCTCTCCCGCTTCCCTCTGGCCCGACAGTTCTCCCTGGAGTCAGGCTCTTCCGGCAAGTCAAGC
TCATCCCTGGTACGAGGCGTGCGTCTCTCCTCCAGCGGCCCCGCCTTGCTCGCCGGCCTCGCTGGTGCTTGGG
AAGCCCCTAGGCGAGGGCTGCTTTGGCCAGGTAGTACGTGCAGAGGCCTTTGGCATGGACCCTGCCCGGCCTG
ACCAAGCCAGCACTGTGGCCGTCAAGATGCTCAAAGACAACGCCTCTGACAAGGACCTGGCCGACCTGGTCTC
GGAGATGGAGGTGATGAAGCTGATCGGCCGACACAAGAACATCATCAACCTGCTTGGTGTCTGCACCCAGGAA
GGGCCCCTGTACGTGATCATGGAGTGCGCCGCCAAGGGAAACCTGCGGGAGTTCCTGCGGGCCCGGCGCCCCC
CAGGCCCCGACCTCAGCCCCGACGGTCCTCGGAGCAGTGAGGGGCCGCTCTCCTTCCCAGTCCTGGTCTCCTG
CGCCTACCAGGTGGCCCGAGGCATGCAGTATCTGGAGTCCCGGAAGTGTATCCACCGGGACCTGGCTGCCCGC
AATGTGCTGGTGACTGAGGACAATGTGATGAAGATTGCTGACTTTGGGCTGGCCCGCGGCGTCCACCACATTG
ACTACTATAAGAAAACCAGCAACGGCCGCCTGCCTGTGAAGTGGATGGCGCCCGAGGCCTTGTTTGACCGGGT
GTACACACACCAGAGTGACGTGTGGTCTTTTGGGATCCCGCTATGGGAGATCTTCACCCTCGGGGGCTCCCCG
TATCCTGGCATCCCGGTGGAGGAGCTGTTCTCGCTGCTGCGGGAGGGACATCGGATGGACCGACCCCCACACT
GCCCCCCAGAGCTGTACGGGCTGATGCGTGAGTGCTGGCACGCAGCGCCCTCCCAGAGGCCTACCTTCAAGCA
GCTGGTGGAGGCGCTGGACAAGGTCCTGCTGGCCGTCTCTGAGGAGTACCTCGACCTCCGCCTGACCTTCGGA
CCCTATTCCCCCTCTGGTGGGGACGCCAGCAGCACCTGCTCCTCCAGCGATTCTGTCTTCAGCCACGACCCCC
TGCCATTGGGATCCAGCTCCTTCCCCTTCGGGTCTGGGGTGCAGACA

| | | | |
|---|---|---|---|
| NOV1k, SNP 13375043 | | | |
| Protein Sequence | SEQ ID NO: 22 | 789 aa | MW at 86661.7kD |

MRLLLALLGVLLSVPGPPVSSLEASEEVELEPCLAPSLEQQEQELTVALGQPVRLCCGRAERGGHWYKEGSRL
APAGRVRGWRGRLEIASFLPEDAGRYLCPARGSMIVLQNLTLITGDSLTSSNDDEDPESHRDLSNRHSYPQQA
PYWTHPQRMEKKLHAVPAGNTVKFRCPAAGNPTPTIRWLKDGQAFHGENRIGGIRLRHQHWSLVMESVVPSDR
GTYTCLVENAVGSIRYNYLLDVLERSPHRPILQAGLPANTTAVVGSDVELLCKVYSDAQPHIQWLKHIVINGS
SFGADGFPYVQVLKTADINSSEVEVLYLRNVSAEDAGEYTCLAGNSIGLSYQSAWLTVLPVRGQRRTPHGPQQ
RPRPGIRTSSCTRRAPWPWLCSCCWPGCIEGRRSTAGTPARPPLCRSSPASLWPDSSPWSQALPASQAHPWYE
ACVSPPAAPPCSPASLVLGKPLGEGCFGQVVRAEAFGVDPARPDQASTVAVKMLKDNASDKDLADLVSEMEVM
KLIGRHKNIINLLGVCTQEGPLYVTVECAAKGNLREFLRARRPPGPDLSPDGPRSSEGPLSFPVLVSCAYQVA
RGMQYLESRKCIHRDLAARNVLVTEDNVMKIADFGLARGVHHIDYYKKTSNGRLPVKWMAPEALFDRVYTHQS
DVWSFGIPLWEIFTLGGSPYPGIPVEELFSLLREGHRMDRPPHCPPELYGLMRECWHAAPSQRPTFKQLVEAL
DKVLLAVSEEYLDLRLTFGPYSPSGGDASSTCSSSDSVFSHDPLPLGSSSFPFGSGVQT

| | | |
|---|---|---|
| NOV1l, SNP 13375045 | SEQ ID NO: 23 | 2383 bp |
| DNA Sequence | ORF Start: ATG at 17 | ORF Stop: end of sequence |

CACCAAGCTTCCCACCATGCGGCTGCTGCTGGCCCTGTTGGGGGTCCTGCTGAGTGTGCCTGGGCCTCCAGTC
TCGTCCCTGGAGGCCTCTGAGGAAGTGGAGCTTGAGCCCTGCCTGGCTCCCAGCCTGGAGCAGCAAGAGCAGG
AGCTGACAGTAGCCCTTGGGCAGCCTGTGCGGCTGTGCTGTGGGCGGGCTGAGCGTGGTGGCCACTGGTACAA
GGAGGGCAGTCGCCTGGCACCTGCTGGCCGTGTACGGGGCTGGAGGGGCCGCCTAGAGATTGCCAGCTTCCTA
CCTGAGGATGCTGGCCGCTACCTCTGCCCGGCACGAGGCTCCATGATCGTCCTGCAGAATCTCACCTTGATTA
CAGGTGACTCCTTGACCTCCAGCAACGATGATGAGGACCCCGAGTCCCATAGGGACCTCTCGAATAGGCACAG
TTACCCCCAGCAAGCACCCTACTGGACACACCCCCAGCGCATGGAGAAGAAACTGCATGCAGTACCTGCGGGG
AACACCGTCAAGTTCCGCTGTCCAGCTGCAGGCAACCCCACGCCCACCATCCGCTGGCTTAAGGATGGACAGG
CCTTTCATGGGGAGAACCGCATTGGAGGCATTCGGCTGCGCCATCAGCACTGGAGTCTCGTGATGGAGAGCGT
GGTGCCCTCGGACCGCGGCACATACACCTGCCTGGTAGAGAACGCTGTGGGCAGCATCCGTTATAACTACCTG
CTAGATGTGCTGGAGCGGTCCCCGCACCGGCCCATCCTGCAGGCCGGGCTCCCGGCCAACACCACAGCCGTGG
TGGGCAGCGACGTGGAGCTGCTGTGCAAGGTGTACAGCGATGCCCAGCCCCACATCCAGTGGCTGAAGCACAT
CGTCATCAACGGCAGCAGCTTCGGAGCCGACGGTTTCCCCTATGTGCAAGTCCTAAAGACTGCAGACATCAAT
AGCTCAGAGGTGGAGGTCCTGTACCTGCGGAACGTGTCAGCCGAGGACGCAGGCGAGTACACCTGCCTCGCAG
GCAATTCCATCGGCCTCTCCTACCAGTCTGCCTGGCTCACGGTGCTGCCAGTGCGAGGGCAGAGGAGGACCCC
ACATGGACCGCAGCAGCGCCCGAGGCCAGGTATACGGACATCATCCTGTACGCGTCGGGCTCCCTGGCCTTGG
CTGTGCTCCTGCTGCTGGCCGGGCTGTATCGAGGGCAGGCGCTCCACGGCCGGCACCCCCGCCCGCCCGCCAC
TGTGCAGAAGCTCTCCCGCTTCCCTCTGGCCCGACAGTCCTCCCTGGAGTCAGGCTCTTCCGGCAAGTCAAGC
TCATCCCTGGTACGAGGCGTGCGTCTCTCCTCCAGCGGCCCCGCCTTGCTCGCCGGCCTCGCTGGTGCTTGGG
AAGCCCCTAGGCGAGGGCTGCTTTGGCCAGGTAGTACGTGCAGAGGCCTTTGGCATGGACCCTGCCCGGCCTG
ACCAAGCCAGCACTGTGGCCGTCAAGATGCTCAAAGACAACGCCTCTGACAAGGACCTGGCCGACCTGGTCTC
GGGCCCCTGTACGTGATCGTGGAGTGCGCCGCCAAGGGAAACCTGCGGGAGTTCCTGCGGGCCCGGCGCCCCC
CAGGCCCCGACCTCAGCCCCGACGGTCCTCGGAGCAGTGAGGGGCCGCTCTCCTTCCCAGTCCTGGTCTCCTG
CGCCTACCAGGTGGCCCGAGGCATGCAGTATCTGGAGTCCCGGAAGTGTATCCACCGGGACCTGGCTGCCCGC
AATGTGCTGGTGACTGAGGACAATGTGATGAAGATTGCTGACTTTGGGCTGGCCCGCGGCGTCCACCACATTG
ACTACTATAAGAAAACCAGCAACGGCCGCCTGCCTGTGAAGTGGATGGCGCCCGAGGCCTTGTTTGACCGGGT
GTACACACACCAGAGTGACGTGTGGTCTTTTGGGATCCCGCTATGGGAGATCTTCACCCTCGGGGGCTCCCCG
TATCCTGGCATCCCGGTGGAGGAGCTGTTCTCGCTGCTGCGGGAGGGACATCGGATGGACCGACCCCCACACT
GCCCCCCAGAGCTGTACGGGCTGATGCGTGAGTGCTGGCACGCAGCGCCCTCCCAGAGGCCTACCTTCAAGCA
GCTGGTGGAGGCGCTGGACAAGGTCCTGCTGGCCGTCTCTGAGGAGTACCTCGACCTCCGCCTGACCTTCGGA
CCCTATTCCCCCTCTGGTGGGGACGCCAGCAGCACCTGCTCCTCCAGCGATTCTGTCTTCAGCCACGACCCCC
TGCCATTGGGATCCAGCTCCTTCCCCTTCGGGTCTGGGGTGCAGACA

| | | | |
|---|---|---|---|
| NOV1l, SNP 13375045 | | | |
| Protein Sequence | SEQ ID NO: 24 | 789 aa | MW at 86639.7kD |

MRLLLALLGVLLSVPGPPVSSLEASEEVELEPCLAPSLEQQEQELTVALGQPVRLCCGRAERGGHWYKEGSRL
APAGRVRGWRGRLEIASFLPEDAGRYLCPARGSMIVLQNLTLITGDSLTSSNDDEDPESHRDLSNRHSYPQQA
PYWTHPQRMEKKLHAVPAGNTVKFRCPAAGNPTPTIRWLKDGQAFHGENRIGGIRLRHQHWSLVMESVVPSDR
GTYTCLVENAVGSIRYNYLLDVLERSPHRPILQAGLPANTTAVVGSDVELLCKVYSDAQPHIQWLKHIVINGS
SFGADGFPYVQVLKTADINSSEVEVLYLRNVSAEDAGEYTCLAGNSIGLSYQSAWLTVLPVRGQRRTPHGPQQ
RPRPGIRTSSCTRRAPWPWLCSCCWPGCIEGRRSTAGTPARPPLCRSSPASLWPDSSPWSQALPASQAHPWYE
ACVSPPAAPPCSPASLVLGKPLGEGCFGQVVRAEAFGVDPARPDQASTVAVKMLKDNASDKDLADLVSEMEVM
KLIGRHKNIINLLGVCTQEGPLYVTVECAAKGNLREFLRARRPPGPDLSPDGPRSSEGPLSFPVLVSCAYQVA
RGMQYLESRKCIHRDLAARNVLVTEDNVMKIADFGLARGVHHIDYYKKTSNGRLPVKWMAPEALFDRVYTHQS
DVWSFGIPLWEIFTLGGSPYPGIPVEELFSLLREGHRMDRPPHCPPELYGLMRECWHAAPSQRPTFKQLVEAL
DKVLLAVSEEYLDLRLTFGPYSPSGGDASSTCSSSDSVFSHDPLPLGSSSFPFGSGVQT

| | | |
|---|---|---|
| NOV1m, SNP 13375046 | SEQ ID NO: 25 | 2383 bp |
| DNA Sequence | ORF Start: ATG at 17 | ORF Stop: end of sequencea |

CACCAAGCTTCCCACCATGCGGCTGCTGCTGGCCCTGTTGGGGGTCCTGCTGAGTGTGCCTGGGCCTCCAGTC
TCGTCCCTGGAGGCCTCTGAGGAAGTGGAGCTTGAGCCCTGCCTGGCTCCCAGCCTGGAGCAGCAAGAGCAGG
AGCTGACAGTAGCCCTTGGGCAGCCTGTGCGGCTGTGCTGTGGGCGGGCTGAGCGTGGTGGCCACTGGTACAA
GGAGGGCAGTCGCCTGGCACCTGCTGGCCGTGTACGGGGCTGGAGGGGCCGCCTAGAGATTGCCAGCTTCCTA
CCTGAGGATGCTGGCCGCTACCTCTGCCCGGCACGAGGCTCCATGATCGTCCTGCAGAATCTCACCTTGATTA
CAGGTGACTCCTTGACCTCCAGCAACGATGATGAGGACCCCGAGTCCCATAGGGACCTCTCGAATAGGCACAG
TTACCCCCAGCAAGCACCCTACTGGACACACCCCCAGCGCATGGAGAAGAAACTGCATGCAGTACCTGCGGGG
AACACCGTCAAGTTCCGCTGTCCAGCTGCAGGCAACCCCACGCCCACCATCCGCTGGCTTAAGGATGGACAGG
CCTTTCATGGGGAGAACCGCATTGGAGGCATTCGGCTGCGCCATCAGCACTGGAGTCTCGTGATGGAGAGCGT
GGTGCCCTCGGACCGCGGCACATACACCTGCCTGGTAGAGAACGCTGTGGGCAGCATCCGTTATAACTACCTG
CTAGATGTGCTGGAGCGGTCCCCGCACCGGCCCATCCTGCAGGCCGGGCTCCCGGCCAACACCACAGCCGTGG
TGGGCAGCGACGTGGAGCTGCTGTGCAAGGTGTACAGCGATGCCCAGCCCCACATCCAGTGGCTGAAGCACAT
CGTCATCAACGGCAGCAGCTTCGGAGCCGACGGTTTCCCCTATGTGCAAGTCCTAAAGACTGCAGACATCAAT
AGCTCAGAGGTGGAGGTCCTGTACCTGCGGAACGTGTCAGCCGAGGACGCAGGCGAGTACACCTGCCTCGCAG
GCAATTCCATCGGCCTCTCCTACCAGTCTGCCTGGCTCACGGTGCTGCCAGTGCGAGGGCAGAGGAGGACCCC
ACATGGACCGCAGCAGCGCCCGAGGCCAGGTATACGGACATCATCCTGTACGCGTCGGGCTCCCTGGCCTTGG
CTGTGCTCCTGCTGCTGGCCGGGCTGTATCGAGGGCAGGCGCTCCACGGCCGGCACCCCCGCCCGCCCGCCAC
TGTGCAGAAGCTCTCCCGCTTCCCTCTGGCCCGACAGTTCTCCCCGGAGTCAGGCTCTTCCGGCAAGTCAAGC
TCATCCCTGGTACGAGGCGTGCGTCTCTCCTCCAGCGGCCCCGCCTTGCTCGCCGGCCTCGCTGGTGCTTGGG
AAGCCCCTAGGCGAGGGCTGCTTTGGCCAGGTAGTACGTGCAGAGGCCTTTGGCATGGACCCTGCCCGGCCTG
ACCAAGCCAGCACTGTGGCCGTCAAGATGCTCAAAGACAACGCCTCTGACAAGGACCTGGCCGACCTGGTCTC
GGAGATGGAGGTGATGAAGCTGATCGGCCGACACAAGAACATCATCAACCTGCTTGGTGTCTGCACCCAGGAA
GGGCCCCTGTACGTGATCGTGGAGTGCGCCGCCAAGGGAAACCTGCGGGAGTTCCTGCGGGCCCGGCGCCCCC
CAGGCCCCGACCTCAGCCCCGACGGTCCTCGGAGCAGTGAGGGGCCGCTCTCCTTCCCAGTCCTGGTCTCCTG
CGCCTACCAGGTGGCCCGAGGCATGCAGTATCTGGAGTCCCGGAAGTGTATCCACCGGGACCTGGCTGCCCGC
AATGTGCTGGTGACTGAGGACAATGTGATGAAGATTGCTGACTTTGGGCTGGCCCGCGGCGTCCACCACATTG
ACTACTATAAGAAAACCAGCAACGGCCGCCTGCCTGTGAAGTGGATGGCGCCCGAGGCCTTGTTTGACCGGGT
GTACACACACCAGAGTGACGTGTGGTCTTTTGGGATCCCGCTATGGGAGATCTTCACCCTCGGGGGCTCCCCG
TATCCTGGCATCCCGGTGGAGGAGCTGTTCTCGCTGCTGCGGGAGGGACATCGGATGGACCGACCCCCACACT
GCCCCCCAGAGCTGTACGGGCTGATGCGTGAGTGCTGGCACGCAGCGCCCTCCCAGAGGCCTACCTTCAAGCA
GCTGGTGGAGGCGCTGGACAAGGTCCTGCTGGCCGTCTCTGAGGAGTACCTCGACCTCCGCCTGACCTTCGGA
CCCTATTCCCCCTCTGGTGGGGACGCCAGCAGCACCTGCTCCTCCAGCGATTCTGTCTTCAGCCACGACCCCC
TGCCATTGGGATCCAGCTCCTTCCCCTTCGGGTCTGGGGTGCAGACA

| | | | |
|---|---|---|---|
| NOV1m, SNP 13375046 | | | |
| Protein Sequence | SEQ ID NO: 26 | 789 aa | MW at 86599.6kD |

MRLLLALLGVLLSVPGPPVSSLEASEEVELEPCLAPSLEQQEQELTVALGQPVRLCCGRAERGGHWYKEGSRL
APAGRVRGWRGRLEIASFLPEDAGRYLCPARGSMIVLQNLTLITGDSLTSSNDDEDPESHRDLSNRHSYPQQA
PYWTHPQRMEKKLHAVPAGNTVKFRCPAAGNPTPTIRWLKDGQAFHGENRIGGIRLRHQHWSLVMESVVPSDR
GTYTCLVENAVGSIRYNYLLDVLERSPHRPILQAGLPANTTAVVGSDVELLCKVYSDAQPHIQWLKHIVINGS
SFGADGFPYVQVLKTADINSSEVEVLYLRNVSAEDAGEYTCLAGNSIGLSYQSAWLTVLPVRGQRRTPHGPQQ
RPRPGIRTSSCTRRAPWPWLCSCCWPGCIEGRRSTAGTPARPPLCRSSPASLWPDSSPWSQALPASQAHPWYE
ACVSPPAAPPCSPASLVLGKPLGEGCFGQVVRAEAFGVDPARPDQASTVAVKMLKDNASDKDLADLVSEMEVM
KLIGRHKNIINLLGVCTQEGPLYVTVECAAKGNLREFLRARRPPGPDLSPDGPRSSEGPLSFPVLVSCAYQVA
RGMQYLESRKCIHRDLAARNVLVTEDNVMKIADFGLARGVHHIDYYKKTSNGRLPVKWMAPEALFDRVYTHQS
DVWSFGIPLWEIFTLGGSPYPGIPVEELFSLLREGHRMDRPPHCPPELYGLMRECWHAAPSQRPTFKQLVEAL
DKVLLAVSEEYLDLRLTFGPYSPSGGDASSTCSSSDSVFSHDPLPLGSSSFPFGSGVQT

| | | |
|---|---|---|
| NOV1n, SNP 13375047 | SEQ ID NO: 27 | 2383 bp |
| DNA Sequence | ORF Start: ATG at 17 | ORF Stop: end of sequence |

CACCAAGCTTCCCACCATGCGGCTGCTGCTGGCCCTGTTGGGGGTCCTGCTGAGTGTGCCTGGGCCTCCAGTC
TCGTCCCTGGAGGCCTCTGAGGAAGTGGAGCTTGAGCCCTGCCTGGCTCCCAGCCTGGAGCAGCAAGAGCAGG
AGCTGACAGTAGCCCTTGGGCAGCCTGTGCGGCTGTGCTGTGGGCGGGCTGAGCGTGGTGGCCACTGGTACAA
GGAGGGCAGTCGCCTGGCACCTGCTGGCCGTGTACGGGGCTGGAGGGGCCGCCTAGAGATTGCCAGCTTCCTA
CCTGAGGATGCTGGCCGCTACCTCTGCCCGGCACGAGGCTCCATGATCGTCCTGCAGAATCTCACCTTGATTA
CAGGTGACTCCTTGACCTCCAGCAACGATGATGAGGACCCCGAGTCCCATAGGGACCTCTCGAATAGGCACAG
TTACCCCCAGCAAGCACCCTACTGGACACACCCCCAGCGCATGGAGAAGAAACTGCATGCAGTACCTGCGGGG
AACACCGTCAAGTTCCGCTGTCCAGCTGCAGGCAACCCCACGCCCACCATCCGCTGGCTTAAGGATGGACAGG
CCTTTCATGGGGAGAACCGCATTGGAGGCATTCGGCTGCGCCATCAGCACTGGAGTCTCGTGATGGAGAGCGT
GGTGCCCTCGGACCGCGGCACATACACCTGCCTGGTAGAGAACGCTGTGGGCAGCATCCGTTATAACTACCTG
CTAGATGTGCTGGAGCGGTCCCCGCACCGGCCCATCCTGCAGGCCGGGCTCCCGGCCAACACCACAGCCGTGG
TGGGCAGCGACGTGGAGCTGCTGTGCAAGGTGTACAGCGATGCCCAGCCCCACATCCAGTGGCTGAAGCACAT
CGTCATCAACGGCAGCAGCTTCGGAGCCGACGGTTTCCCCTATGTGCAAGTCCTAAAGACTGCAGACATCAAT
AGCTCAGAGGTGGAGGTCCTGTACCTGCGGAACGTGTCAGCCGAGGACGCAGGCGAGTACACCTGCCTCGCAG
GCAATTCCATCGGCCTCTCCTACCAGTCTGCCTGGCTCACGGTGCTGCCAGTGCGAGGGCAGAGGAGGACCCC
ACATGGACCGCAGCAGCGCCCGAGGCCAGGTATACGGACATCATCCTGTACGCGTCGGGCTCCCTGGCCTTGG
CTGTGCTCCTGCTGCTGGCCGGGCTGTATCGAGGGCAGGCGCTCCACGGCCGGCACCCCCGCCCGCCCGCCAC
TGTGCAGAAGCTCTCCCGCTTCCCTCTGGCCCGACAGTTCTCCCTGGAGTCAGACTCTTCCGGCAAGTCAAGC
TCATCCCTGGTACGAGGCGTGCGTCTCTCCTCCAGCGGCCCCGCCTTGCTCGCCGGCCTCGCTGGTGCTTGGG
AAGCCCCTAGGCGAGGGCTGCTTTGGCCAGGTAGTACGTGCAGAGGCCTTTGGCATGGACCCTGCCCGGCCTG
ACCAAGCCAGCACTGTGGCCGTCAAGATGCTCAAAGACAACGCCTCTGACAAGGACCTGGCCGACCTGGTCTC
GGAGATGGAGGTGATGAAGCTGATCGGCCGACACAAGAACATCATCAACCTGCTTGGTGTCTGCACCCAGGAA
GGGCCCCTGTACGTGATCGTGGAGTGCGCCGCCAAGGGAAACCTGCGGGAGTTCCTGCGGGCCCGGCGCCCCC
CAGGCCCCGACCTCAGCCCCGACGGTCCTCGGAGCAGTGAGGGGCCGCTCTCCTTCCCAGTCCTGGTCTCCTG
CGCCTACCAGGTGGCCCGAGGCATGCAGTATCTGGAGTCCCGGAAGTGTATCCACCGGGACCTGGCTGCCCGC
AATGTGCTGGTGACTGAGGACAATGTGATGAAGATTGCTGACTTTGGGCTGGCCCGCGGCGTCCACCACATTG
ACTACTATAAGAAAACCAGCAACGGCCGCCTGCCTGTGAAGTGGATGGCGCCCGAGGCCTTGTTTGACCGGGT
GTACACACACCAGAGTGACGTGTGGTCTTTTGGGATCCCGCTATGGGAGATCTTCACCCTCGGGGGCTCCCCG
TATCCTGGCATCCCGGTGGAGGAGCTGTTCTCGCTGCTGCGGGAGGGACATCGGATGGACCGACCCCCACACT
GCCCCCCAGAGCTGTACGGGCTGATGCGTGAGTGCTGGCACGCAGCGCCCTCCCAGAGGCCTACCTTCAAGCA
GCTGGTGGAGGCGCTGGACAAGGTCCTGCTGGCCGTCTCTGAGGAGTACCTCGACCTCCGCCTGACCTTCGGA
CCCTATTCCCCCTCTGGTGGGGACGCCAGCAGCACCTGCTCCTCCAGCGATTCTGTCTTCAGCCACGACCCCC
TGCCATTGGGATCCAGCTCCTTCCCCTTCGGGTCTGGGGTGCAGACA

| | | | |
|---|---|---|---|
| NOV1n, SNP 13375047 | | | |
| Protein Sequence | SEQ ID NO: 28 | 789 aa | MW at 86659.7kD |

MRLLLALLGVLLSVPGPPVSSLEASEEVELEPCLAPSLEQQEQELTVALGQPVRLCCGRAERGGHWYKEGSRL
APAGRVRGWRGRLEIASFLPEDAGRYLCPARGSMIVLQNLTLITGDSLTSSNDDEDPESHRDLSNRHSYPQQA
PYWTHPQRMEKKLHAVPAGNTVKFRCPAAGNPTPTIRWLKDGQAFHGENRIGGIRLRHQHWSLVMESVVPSDR
GTYTCLVENAVGSIRYNYLLDVLERSPHRPILQAGLPANTTAVVGSDVELLCKVYSDAQPHIQWLKHIVINGS
SFGADGFPYVQVLKTADINSSEVEVLYLRNVSAEDAGEYTCLAGNSIGLSYQSAWLTVLPVRGQRRTPHGPQQ
RPRPGIRTSSCTRRAPWPWLCSCCWPGCIEGRRSTAGTPARPPLCRSSPASLWPDSSPWSQALPASQAHPWYE
ACVSPPAAPPCSPASLVLGKPLGEGCFGQVVRAEAFGVDPARPDQASTVAVKMLKDNASDKDLADLVSEMEVM
KLIGRHKNIINLLGVCTQEGPLYVTVECAAKGNLREFLRARRPPGPDLSPDGPRSSEGPLSFPVLVSCAYQVA
RGMQYLESRKCIHRDLAARNVLVTEDNVMKIADFGLARGVHHIDYYKKTSNGRLPVKWMAPEALFDRVYTHQS
DVWSFGIPLWEIFTLGGSPYPGIPVEELFSLLREGHRMDRPPHCPPELYGLMRECWHAAPSQRPTFKQLVEAL
DKVLLAVSEEYLDLRLTFGPYSPSGGDASSTCSSSDSVFSHDPLPLGSSSFPFGSGVQT

| | | |
|---|---|---|
| NOV1o, SNP 13378017 | SEQ ID NO: 29 | 2383 bp |
| DNA Sequence | ORF Start: ATG at 17 | ORF Stop: end of sequence |

CACCAAGCTTCCCACCATGCGGCTGCTGCTGGCCCTGTTGGGGGTCCTGCTGAGTGTGCCTGGGCCTCCAGTC
TCGTCCCTGGAGGCCTCTGAGGAAGTGGAGCTTGAGCCCTGCCTGGCTCCCAGCCTGGAGCAGCAAGAGCAGG
AGCTGACAGTAGCCCTTGGGCAGCCTGTGCGGCTGTGCTGTGGGCGGGCTGAGCGTGGTGGCCACTGGTACAA
GGAGGGCAGTCGCCTGGCACCTGCTGGCCGTGTACGGGGCTGGAGGGGCCGCCTAGAGATTGCCAGCTTCCTA
CCTGAGGATGCTGGCCGCTACCTCTGCCCGGCACGAGGCTCCATGATCGTCCTGCAGAATCTCACCTTGATTA
CAGGTGACTCCTTGACCTCCAGCAACGATGATGAGGACCCCGAGTCCCATAGGGACCTCTCGAATAGGCACAG
TTACCCCCAGCAAGCACCCTACTGGACACACCCCCAGCGCATGGAGAAGAAACTGCATGCAGTACCTGCGGGG
AACACCGTCAAGTTCCGCTGTCCAGCTGCAGGCAACCCCACGCCCACCATCCGCTGGCTTAAGGATGGACAGG
CCTTTCATGGGGAGAACCGCATTGGAGGCATTCGGCTGCGCCATCAGCACTGGAGTCTCGTGATGGAGAGCGT
GGTGCCCTCGGACCGCGGCACATACACCTGCCTGGTAGAGAACGCTGTGGGCAGCATCCGTTATAACTACCTG
CTAGATGTGCTGGAGCGGTCCCCGCACCGGCCCATCCTGCAGGCCGGGCTCCCGGCCAACACCACAGCCGTGG
TGGGCAGCGACGTGGAGCTGCTGTGCAAGGTGTACAGCGATGCCCAGCCCCACATCCAGTGGCTGAAGCACAT
CGTCATCAACGGCAGCAGCTTCGGAGCCGACGGTTTCCCCTATGTGCAAGTCCTAAAGACTGCAGACATCAAT
AGCTCAGAGGTGGAGGTCCTGTACCTGCGGAACGTGTCAGCCGAGGACGCAGGCGAGTACACCTGCCTCGCAG
GCAATTCCATCGGCCTCTCCTACCAGTCTGCCTGGCTCACGGTGCTGCCAGTGCGAGGGCAGAGGAGGACCCC
ACATGGACCGCAGCAGCGCCCGAGGCCAGGTATACGGACATCATCCTGTACGCGTCGGGCTCCCTGGCCTTGG
CTGTGCTCCTGCTGCTGGCCGGGCTGTATCGAGGGCAGGCGCTCCACGGCCGGCACCCCCGCCCGCCCGCCAC
TGTGCAGAAGCTCTCCCGCTTCCCTCTGGCCCGACAGTTCTCCCTGGAGTCAGGCTCTTCCGGCAAGTCAAGC
TCATCCCTGGTACGAGGCGTGCGTCTCTCCTCCAGCGGCCCCGCCTTGCTCGCCGGCCTCGCTGGTGCTTGGG
AAGCCCCTAGGCGAGGGCTGCTTTGGCCAGGTAGTACGTGCAGAGGCCTTTGGCATGGACCCTGCCCGGCCTG
ACCAAGCCAGCACTGTGGCCGTCAAGATGCTCAAAGACAACGCCTCTGACAAGGACCTGGCCGACCTGGTCTC
GGAGATGGAGGTGATGAAGCTGATCGGCCGACACAAGAACATCATCAACCTGCTTGGTGTCTGCACCCAGGAA
GGGCCCCTGTACGTGATCGTGGAGTGCGCCGCCAAGGGAAACCTGCGGGAGTTCCTGCGGGCCCGGCGCCCCC
CAGGCCCCGACCTCAGCCCCGACGGTCCTCGGAGCAGTGAGGGGCCGCTCTCCTTCCCAGTCCTGGTCTCCTG
CGCCTACCAGGTGGCCCGAGGCATGCAGTATCTGGAGTCCCGGAAGTGTATCCACCGGGACCTGGCTGCCCGC
AATGTGCTGGTGACTGAGGACAATGTGATGAAGATTGCTGACTTTGGGCTGGCCCGCGGCGTCCACCACATTG
ACTACTATAAGAAAACCAGCAACGGCCGCCTGCCTGTGAAGTGGATGGCGCCCGAGGCCTTGTTTGACCGGGT
GTACACACACCAGAGTGACGTGTGGTCTTTTGGGATCCCGCTATGGGAGATCTTCACCCTCGGGGGCTCCCCG
TATCCTGGCATCCCGGTGGAGGAGCTGTTCTCGCTGCTGCGGGAGGGACATCGGATGGACCGACCCCCACACT
GCCCCCCAGAGCTGTACGGGCTGATGCGTGAGTGCTGGCACGCAGCGCCCTCCCAGAGGCCTACCTTCAAGCA
GCTGGTGGAGGCGCTGGACAAGGTCCTGCTGGCCGTCTCTGAGGAGTACCTCGACCTCCGCCTGGCCTTCGGA
CCCTATTCCCCCTCTGGTGGGGACGCCAGCAGCACCTGCTCCTCCAGCGATTCTGTCTTCAGCCACGACCCCC
TGCCATTGGGATCCAGCTCCTTCCCCTTCGGGTCTGGGGTGCAGACA

| | | | |
|---|---|---|---|
| NOV1o, SNP 13378017 | | | |
| Protein Sequence | SEQ ID NO: 30 | 789 aa | MW at 86599.6kD |

MRLLLALLGVLLSVPGPPVSSLEASEEVELEPCLAPSLEQQEQELTVALGQPVRLCCGRAERGGHWYKEGSRL
APAGRVRGWRGRLEIASFLPEDAGRYLCPARGSMIVLQNLTLITGDSLTSSNDDEDPESHRDLSNRHSYPQQA
PYWTHPQRMEKKLHAVPAGNTVKFRCPAAGNPTPTIRWLKDGQAFHGENRIGGIRLRHQHWSLVMESVVPSDR
GTYTCLVENAVGSIRYNYLLDVLERSPHRPILQAGLPANTTAVVGSDVELLCKVYSDAQPHIQWLKHIVINGS
SFGADGFPYVQVLKTADINSSEVEVLYLRNVSAEDAGEYTCLAGNSIGLSYQSAWLTVLPVRGQRRTPHGPQQ
RPRPGIRTSSCTRRAPWPWLCSCCWPGCIEGRRSTAGTPARPPLCRSSPASLWPDSSPWSQALPASQAHPWYE
ACVSPPAAPPCSPASLVLGKPLGEGCFGQVVRAEAFGVDPARPDQASTVAVKMLKDNASDKDLADLVSEMEVM
KLIGRHKNIINLLGVCTQEGPLYVTVECAAKGNLREFLRARRPPGPDLSPDGPRSSEGPLSFPVLVSCAYQVA
RGMQYLESRKCIHRDLAARNVLVTEDNVMKIADFGLARGVHHIDYYKKTSNGRLPVKWMAPEALFDRVYTHQS
DVWSFGIPLWEIFTLGGSPYPGIPVEELFSLLREGHRMDRPPHCPPELYGLMRECWHAAPSQRPTFKQLVEAL
DKVLLAVSEEYLDLRLTFGPYSPSGGDASSTCSSSDSVFSHDPLPLGSSSFPFGSGVQT

| | | |
|---|---|---|
| NOV1p, SNP 13378286 | SEQ ID NO: 31 | 2383 bp |
| DNA Sequence | ORF Start: ATG at 17 | ORF Stop: end of sequence |

CACCAAGCTTCCCACCATGCGGCTGCTGCTGGCCCTGTTGGGGGTCCTGCTGAGTGTGCCTGGGCCTCCAGTC
TCGTCCCTGGAGGCCTCTGAGGAAGTGGAGCTTGAGCCCTGCCTGGCTCCCAGCCTGGAGCAGCAAGAGCAGG
AGCTGACAGTAGCCCTTGGGCAGCCTGTGCGGCTGTGCTGTGGGCGGGCTGAGCGTGGTGGCCACTGGTACAA
GGAGGGCAGTCGCCTGGCACCTGCTGGCCGTGTACGGGGCTGGAGGGGCCGCCTAGAGATTGCCAGCTTCCTA
CCTGAGGATGCTGGCCGCTACCTCTGCCCGGCACGAGGCTCCATGATCGTCCTGCAGAATCTCACCTTGATTA
CAGGTGACTCCTTGACCTCCAGCAACGATGATGAGGACCCCGAGTCCCATAGGGACCTCTCGAATAGGCACAG
TTACCCCCAGCAAGCACCCTACTGGACACACCCCCAGCGCATGGAGAAGAAACTGCATGCAGTACCTGCGGGG
AACACCGTCAAGTTCCGCTGTCCAGCTGCAGGCAACCCCACGCCCACCATCCGCTGGCTTAAGGATGGACAGG
CCTTTCATGGGGAGAACCGCATTGGAGGCATTCGGCTGCGCCATCAGCACTGGAGTCTCGTGATGGAGAGCGT
GGTGCCCTCGGACCGCGGCACATACACCTGCCTGGTAGAGAACGCTGTGGGCAGCATCCGTTATAACTACCTG
CTAGATGTGCTGGAGCGGTCCCCGCACCGGCCCATCCTGCAGGCCGGGCTCCCGGCCAACACCACAGCCGTGG
TGGGCAGCGACGTGGAGCCGCTGTGCAAGGTGTACAGCGATGCCCAGCCCCACATCCAGTGGCTGAAGCACAT
CGTCATCAACGGCAGCAGCTTCGGAGCCGACGGTTTCCCCTATGTGCAAGTCCTAAAGACTGCAGACATCAAT
AGCTCAGAGGTGGAGGTCCTGTACCTGCGGAACGTGTCAGCCGAGGACGCAGGCGAGTACACCTGCCTCGCAG
GCAATTCCATCGGCCTCTCCTACCAGTCTGCCTGGCTCACGGTGCTGCCAGTGCGAGGGCAGAGGAGGACCCC
ACATGGACCGCAGCAGCGCCCGAGGCCAGGTATACGGACATCATCCTGTACGCGTCGGGCTCCCTGGCCTTGG
CTGTGCTCCTGCTGCTGGCCGGGCTGTATCGAGGGCAGGCGCTCCACGGCCGGCACCCCCGCCCGCCCGCCAC
TGTGCAGAAGCTCTCCCGCTTCCCTCTGGCCCGACAGTTCTCCCTGGAGTCAGGCTCTTCCGGCAAGTCAAGC
TCATCCCTGGTACGAGGCGTGCGTCTCTCCTCCAGCGGCCCCGCCTTGCTCGCCGGCCTCGCTGGTGCTTGGG
AAGCCCCTAGGCGAGGGCTGCTTTGGCCAGGTAGTACGTGCAGAGGCCTTTGGCATGGACCCTGCCCGGCCTG
ACCAAGCCAGCACTGTGGCCGTCAAGATGCTCAAAGACAACGCCTCTGACAAGGACCTGGCCGACCTGGTCTC
GGAGATGGAGGTGATGAAGCTGATCGGCCGACACAAGAACATCATCAACCTGCTTGGTGTCTGCACCCAGGAA
GGGCCCCTGTACGTGATCGTGGAGTGCGCCGCCAAGGGAAACCTGCGGGAGTTCCTGCGGGCCCGGCGCCCCC
CAGGCCCCGACCTCAGCCCCGACGGTCCTCGGAGCAGTGAGGGGCCGCTCTCCTTCCCAGTCCTGGTCTCCTG
CGCCTACCAGGTGGCCCGAGGCATGCAGTATCTGGAGTCCCGGAAGTGTATCCACCGGGACCTGGCTGCCCGC
AATGTGCTGGTGACTGAGGACAATGTGATGAAGATTGCTGACTTTGGGCTGGCCCGCGGCGTCCACCACATTG
ACTACTATAAGAAAACCAGCAACGGCCGCCTGCCTGTGAAGTGGATGGCGCCCGAGGCCTTGTTTGACCGGGT
GTACACACACCAGAGTGACGTGTGGTCTTTTGGGATCCCGCTATGGGAGATCTTCACCCTCGGGGGCTCCCCG
TATCCTGGCATCCCGGTGGAGGAGCTGTTCTCGCTGCTGCGGGAGGGACATCGGATGGACCGACCCCCACACT
GCCCCCCAGAGCTGTACGGGCTGATGCGTGAGTGCTGGCACGCAGCGCCCTCCCAGAGGCCTACCTTCAAGCA
GCTGGTGGAGGCGCTGGACAAGGTCCTGCTGGCCGTCTCTGAGGAGTACCTCGACCTCCGCCTGACCTTCGGA
CCCTATTCCCCCTCTGGTGGGGACGCCAGCAGCACCTGCTCCTCCAGCGATTCTGTCTTCAGCCACGACCCCC
TGCCATTGGGATCCAGCTCCTTCCCCTTCGGGTCTGGGGTGCAGACA

| | | | |
|---|---|---|---|
| NOV1p, SNP 13378286 | | | |
| Protein Sequence | SEQ ID NO: 32 | 789 aa | MW at 86613.6kD |

MRLLLALLGVLLSVPGPPVSSLEASEEVELEPCLAPSLEQQEQELTVALGQPVRLCCGRAERGGHWYKEGSRL
APAGRVRGWRGRLEIASFLPEDAGRYLCPARGSMIVLQNLTLITGDSLTSSNDDEDPESHRDLSNRHSYPQQA
PYWTHPQRMEKKLHAVPAGNTVKFRCPAAGNPTPTIRWLKDGQAFHGENRIGGIRLRHQHWSLVMESVVPSDR
GTYTCLVENAVGSIRYNYLLDVLERSPHRPILQAGLPANTTAVVGSDVELLCKVYSDAQPHIQWLKHIVINGS
SFGADGFPYVQVLKTADINSSEVEVLYLRNVSAEDAGEYTCLAGNSIGLSYQSAWLTVLPVRGQRRTPHGPQQ
RPRPGIRTSSCTRRAPWPWLCSCCWPGCIEGRRSTAGTPARPPLCRSSPASLWPDSSPWSQALPASQAHPWYE
ACVSPPAAPPCSPASLVLGKPLGEGCFGQVVRAEAFGVDPARPDQASTVAVKMLKDNASDKDLADLVSEMEVM
KLIGRHKNIINLLGVCTQEGPLYVTVECAAKGNLREFLRARRPPGPDLSPDGPRSSEGPLSFPVLVSCAYQVA
RGMQYLESRKCIHRDLAARNVLVTEDNVMKIADFGLARGVHHIDYYKKTSNGRLPVKWMAPEALFDRVYTHQS
DVWSFGIPLWEIFTLGGSPYPGIPVEELFSLLREGHRMDRPPHCPPELYGLMRECWHAAPSQRPTFKQLVEAL
DKVLLAVSEEYLDLRLTFGPYSPSGGDASSTCSSSDSVFSHDPLPLGSSSFPFGSGVQT

| | | |
|---|---|---|
| NOV1q, SNP 13379321 | SEQ ID NO: 33 | 2383 bp |
| DNA Sequence | ORF Start: ATG at 1 | ORF Stop: end of sequence |

CACCAAGCTTCCCACCATGCGGCTGCTGCTGGCCCTGTTGGGGGTCCTGCTGAGTGTGCCTGGGCCTCCAGTC
TCGTCCCTGGAGGCCTCTGAGGAAGTGGAGCTTGAGCCCTGCCTGGCTCCCAGCCTGGAGCAGCAAGAGCAGG
AGCTGACAGTAGCCCTTGGGCAGCCTGTGCGGCTGTGCTGTGGGCGGGCTGAGCGTGGTGGCCACTGGTACAA
GGAGGGCAGTCGCCTGGCACCTGCTGGCCGTGTACGGGGCTGGAGGGGCCGCCTAGAGATTGCCAGCTTCCTA
CCTGAGGATGCTGGCCGCTACCTCTGCCCGGCACGAGGCTCCATGATCGTCCTGCAGAATCTCACCTTGATTA
CAGGTGACTCCTTGACCTCCAGCAACGATGATGAGGACCCCGAGTCCCATAGGGACCTCTCGAATAGGCACAG
TTACCCCCAGCAAGCACCCTACTGGACACACCCCCAGCGCATGGAGAAGAAACTGCATGCAGTACCTGCGGGG
AACACCGTCAAGTTCCGCTGTCCAGCTGCAGGCAACCCCACGCCCACCATCCGCTGGCTTAAGGATGGACAGG
CCTTTCATGGGGAGAACCGCATTGGAGGCATTCGGCTGCGCCATCAGCACTGGAGTCTCGTGATGGAGAGCGT
GGTGCCCTCGGACCGCGGCACATACACCTGCCTGGTAGAGAACGCTGTGGGCAGCATCCGTTATAACTACCTG
CTAGATGTGCTGGAGCGGTCCCCGCACCGGCCCATCCTGCAGGCCGGGCTCCCGGCCAACACCACAGCCGTGG
TGGGCAGCGACGTGGAGCTGCTGTGCAAGGTGTACAGCGATGCCCAGCCCCACATCCAGTGGCTGAAGCACAT
CGTCATCAACGGCAGCAGCTTCGGAGCCGACGGTTTCCCCTATGTGCAAGTCCTAAAGACTGCAGACATCAAT
AGCTCAGAGGTGGAGGTCCTGTACCTGCGGAACGTGTCAGCCGAGGACGCAGGCGAGTACACCTGCCTCGCAG
GCAATTCCATCGGCCTCTCCTACCAGTCTGCCTGGCTCACGGTGCTGCCAGTGCGAGGGCAGAGGAGGACCCC
ACATGGACCGCAGCAGCGCCCGAGGCCAGGTATACGGACATCATCCTGTACGCGTCGGGCTCCCTGGCCTTGG
CTGTGCTCCTGCTGCTGGCCGGGCTGTATCGAGGGCAGGCGCTCCACGGCCGGCACCCCCGCCCGCCCGCCAC
TGTGCAGAAGCTCTCCCGCTTCCCTCTGGCCCGACAGTTCTCCCTGGAGTCAGGCTCTTCCGGCAAGTCAAGC
TCATCCCTGGTACGAGGCGTGCGTCTCTCCTCCAGCGGCCCCGCCTTGCTCGCCGGCCTCGCTGGTGCTTGGG
AAGCCCCTAGGCGAGGGCTGCTTTGGCCAGGTAGTACGTGCAGAGGCCTTTGGCATGGACCCTGCCCGGCCTG
ACCAAGCCAGCACTGTGGCCGTCAAGATGCTCAAAGACAACGCCTCTGACAAGGACCTGGCCGACCTGGTCTC
GGAGATGGAGGTGATGAAGCTGATCGGCCGACACAAGAACATCATCAACCTGCTTGGTGTCTGCACCCAGGAA
GGGCCCCTGTACGTGATCGTGGAGTGCGCCGCCAAGGGAAACCTGCGGGAGTTCCTGCGGGCCCGGCGCCCCC
CAGGCCCCGACCTCAGCCCCGACGGTCCTCGGAGCAGTGAGGGGCCGCTCTCCTTCCCAGTCCTGGTCTCCTG
CGCCTACCAGGTGGCCCGAGGCATGCAGTATCTGGAGTCCCGGAAGTGTATCCACCGGGACCTGGCTGCCCGC
AATGTGCTGGTGACTGAGGACAATGTGATGAAGATTGCTGACTTTGGGCTGGCCCGCGGCGTCCACCACATTG
ACTACTATAAGAAAACCAGCAACGGCCGCCTGCCTGTGAAGTGGATGGCGCCCGAGGCCTTGTTTGACCGGGT
GTACACACACCAGAGTGACGTGTGGTCTTTTGGGATCCCGCTATGGGAGATCTTCACCCTCGGGGGCTCCCCG
TATCCTGGCATCCCGGTGGAGGAGCTGTTCTCGCTGCTGCGGGAGGGACATCGGATGGACCGACCCCCACACT
GCCCCCCAGAGCTGTACGGGCTGATGCGTGAGTGCTGGCACGCAGCGCCCCCCCAGAGGCCTACCTTCAAGCA
GCTGGTGGAGGCGCTGGACAAGGTCCTGCTGGCCGTCTCTGAGGAGTACCTCGACCTCCGCCTGACCTTCGGA
CCCTATTCCCCCTCTGGTGGGGACGCCAGCAGCACCTGCTCCTCCAGCGATTCTGTCTTCAGCCACGACCCCC
TGCCATTGGGATCCAGCTCCTTCCCCTTCGGGTCTGGGGTGCAGACA

| | | | |
|---|---|---|---|
| NOV1q, SNP 13379321 | | | |
| Protein Sequence | SEQ ID NO: 34 | 789 aa | MW at 86639.7kD |

MRLLLALLGVLLSVPGPPVSSLEASEEVELEPCLAPSLEQQEQELTVALGQPVRLCCGRAERGGHWYKEGSRL
APAGRVRGWRGRLEIASFLPEDAGRYLCPARGSMIVLQNLTLITGDSLTSSNDDEDPESHRDLSNRHSYPQQA
PYWTHPQRMEKKLHAVPAGNTVKFRCPAAGNPTPTIRWLKDGQAFHGENRIGGIRLRHQHWSLVMESVVPSDR
GTYTCLVENAVGSIRYNYLLDVLERSPHRPILQAGLPANTTAVVGSDVELLCKVYSDAQPHIQWLKHIVINGS
SFGADGFPYVQVLKTADINSSEVEVLYLRNVSAEDAGEYTCLAGNSIGLSYQSAWLTVLPVRGQRRTPHGPQQ
RPRPGIRTSSCTRRAPWPWLCSCCWPGCIEGRRSTAGTPARPPLCRSSPASLWPDSSPWSQALPASQAHPWYE
ACVSPPAAPPCSPASLVLGKPLGEGCFGQVVRAEAFGVDPARPDQASTVAVKMLKDNASDKDLADLVSEMEVM
KLIGRHKNIINLLGVCTQEGPLYVTVECAAKGNLREFLRARRPPGPDLSPDGPRSSEGPLSFPVLVSCAYQVA
RGMQYLESRKCIHRDLAARNVLVTEDNVMKIADFGLARGVHHIDYYKKTSNGRLPVKWMAPEALFDRVYTHQS
DVWSFGIPLWEIFTLGGSPYPGIPVEELFSLLREGHRMDRPPHCPPELYGLMRECWHAAPSQRPTFKQLVEAL
DKVLLAVSEEYLDLRLTFGPYSPSGGDASSTCSSSDSVFSHDPLPLGSSSFPFGSGVQT

| | | |
|---|---|---|
| NOV1r, SNP 13379599 | SEQ ID NO: 35 | 2383 bp |
| DNA Sequence | ORF Start: ATG at 17 | ORF Stop: end of sequence |

CACCAAGCTTCCCACCATGCGGCTGCTGCTGGCCCTGTTGGGGGTCCTGCTGAGTGTGCCTGGGCCTCCAGTC
TCGTCCCTGGAGGCCTCTGAGGAAGTGGAGCTTGAGCCCTGCCTGGCTCCCAGCCTGGAGCAGCAAGAGCAGG
AGCTGACAGTAGCCCTTGGGCAGCCTGTGCGGCTGTGCTGTGGGCGGGCTGAGCGTGGTGGCCACTGGTACAA
GGAGGGCAGTCGCCTGGCACCTGCTGGCCGTGTACGGGGCTGGAGGGGCCGCCTAGAGATTGCCAGCTTCCTA
CCTGAGGATGCTGGCCGCTACCTCTGCCCGGCACGAGGCTCCATGATCGTCCTGCAGAATCTCACCTTGATTA
CAGGTGACTCCTTGACCTCCAGCAACGATGATGAGGACCCCGAGTCCCATAGGGACCTCTCGAATAGGCACAG
TTACCCCCAGCAAGCACCCTACTGGACACACCCCCAGCGCATGGAGAAGAAACTGCATGCAGTACCTGCGGGG
AACACCGTCAAGTTCCGCTGTCCAGCTGCAGGCAACCCCACGCCCACCATCCGCTGGCTTAAGGATGGACAGG
CCTTTCATGGGGAGAACCGCATTGGAGGCATTCGGCTGCGCCATCAGCACTGGAGTCTCGTGATGGAGAGCGT
GGTGCCCTCGGACCGCGGCACATACACCTGCCTGGTAGAGAACGCTGTGGGCAGCATCCGTTATAACTACCTG
CTAGATGTGCTGGAGCGGTCCCCGCACCGGCCCATCCTGCGGGCCGGGCTCCCGGCCAACACCACAGCCGTGG
TGGGCAGCGACGTGGAGCTGCTGTGCAAGGTGTACAGCGATGCCCAGCCCCACATCCAGTGGCTGAAGCACAT
CGTCATCAACGGCAGCAGCTTCGGAGCCGACGGTTTCCCCTATGTGCAAGTCCTAAAGACTGCAGACATCAAT
AGCTCAGAGGTGGAGGTCCTGTACCTGCGGAACGTGTCAGCCGAGGACGCAGGCGAGTACACCTGCCTCGCAG
GCAATTCCATCGGCCTCTCCTACCAGTCTGCCTGGCTCACGGTGCTGCCAGTGCGAGGGCAGAGGAGGACCCC
ACATGGACCGCAGCAGCGCCCGAGGCCAGGTATACGGACATCATCCTGTACGCGTCGGGCTCCCTGGCCTTGG
CTGTGCTCCTGCTGCTGGCCGGGCTGTATCGAGGGCAGGCGCTCCACGGCCGGCACCCCCGCCCGCCCGCCAC
TGTGCAGAAGCTCTCCCGCTTCCCTCTGGCCCGACAGTTCTCCCTGGAGTCAGGCTCTTCCGGCAAGTCAAGC
TCATCCCTGGTACGAGGCGTGCGTCTCTCCTCCAGCGGCCCCGCCTTGCTCGCCGGCCTCGCTGGTGCTTGGG
AAGCCCCTAGGCGAGGGCTGCTTTGGCCAGGTAGTACGTGCAGAGGCCTTTGGCATGGACCCTGCCCGGCCTG
ACCAAGCCAGCACTGTGGCCGTCAAGATGCTCAAAGACAACGCCTCTGACAAGGACCTGGCCGACCTGGTCTC
GGAGATGGAGGTGATGAAGCTGATCGGCCGACACAAGAACATCATCAACCTGCTTGGTGTCTGCACCCAGGAA
GGGCCCCTGTACGTGATCGTGGAGTGCGCCGCCAAGGGAAACCTGCGGGAGTTCCTGCGGGCCCGGCGCCCCC
CAGGCCCCGACCTCAGCCCCGACGGTCCTCGGAGCAGTGAGGGGCCGCTCTCCTTCCCAGTCCTGGTCTCCTG
CGCCTACCAGGTGGCCCGAGGCATGCAGTATCTGGAGTCCCGGAAGTGTATCCACCGGGACCTGGCTGCCCGC
AATGTGCTGGTGACTGAGGACAATGTGATGAAGATTGCTGACTTTGGGCTGGCCCGCGGCGTCCACCACATTG
ACTACTATAAGAAAACCAGCAACGGCCGCCTGCCTGTGAAGTGGATGGCGCCCGAGGCCTTGTTTGACCGGGT
GTACACACACCAGAGTGACGTGTGGTCTTTTGGGATCCCGCTATGGGAGATCTTCACCCTCGGGGGCTCCCCG
TATCCTGGCATCCCGGTGGAGGAGCTGTTCTCGCTGCTGCGGGAGGGACATCGGATGGACCGACCCCCACACT
GCCCCCCAGAGCTGTACGGGCTGATGCGTGAGTGCTGGCACGCAGCGCCCTCCCAGAGGCCTACCTTCAAGCA
GCTGGTGGAGGCGCTGGACAAGGTCCTGCTGGCCGTCTCTGAGGAGTACCTCGACCTCCGCCTGACCTTCGGA
CCCTATTCCCCCTCTGGTGGGGACGCCAGCAGCACCTGCTCCTCCAGCGATTCTGTCTTCAGCCACGACCCCC
TGCCATTGGGATCCAGCTCCTTCCCCTTCGGGTCTGGGGTGCAGACA

| | | | |
|---|---|---|---|
| NOV1r, SNP 13379599 | | | |
| Protein Sequence | SEQ ID NO: 36 | 789 aa | MW at 86657.7kD |

MRLLLALLGVLLSVPGPPVSSLEASEEVELEPCLAPSLEQQEQELTVALGQPVRLCCGRAERGGHWYKEGSRL
APAGRVRGWRGRLEIASFLPEDAGRYLCPARGSMIVLQNLTLITGDSLTSSNDDEDPESHRDLSNRHSYPQQA
PYWTHPQRMEKKLHAVPAGNTVKFRCPAAGNPTPTIRWLKDGQAFHGENRIGGIRLRHQHWSLVMESVVPSDR
GTYTCLVENAVGSIRYNYLLDVLERSPHRPILQAGLPANTTAVVGSDVELLCKVYSDAQPHIQWLKHIVINGS
SFGADGFPYVQVLKTADINSSEVEVLYLRNVSAEDAGEYTCLAGNSIGLSYQSAWLTVLPVRGQRRTPHGPQQ
RPRPGIRTSSCTRRAPWPWLCSCCWPGCIEGRRSTAGTPARPPLCRSSPASLWPDSSPWSQALPASQAHPWYE
ACVSPPAAPPCSPASLVLGKPLGEGCFGQVVRAEAFGVDPARPDQASTVAVKMLKDNASDKDLADLVSEMEVM
KLIGRHKNIINLLGVCTQEGPLYVTVECAAKGNLREFLRARRPPGPDLSPDGPRSSEGPLSFPVLVSCAYQVA
RGMQYLESRKCIHRDLAARNVLVTEDNVMKIADFGLARGVHHIDYYKKTSNGRLPVKWMAPEALFDRVYTHQS
DVWSFGIPLWEIFTLGGSPYPGIPVEELFSLLREGHRMDRPPHCPPELYGLMRECWHAAPSQRPTFKQLVEAL
DKVLLAVSEEYLDLRLTFGPYSPSGGDASSTCSSSDSVFSHDPLPLGSSSFPFGSGVQT

| | | |
|---|---|---|
| NOV1s, SNP 13381615 | SEQ ID NO: 37 | 2383 bp |
| DNA Sequence | ORF Start: ATG at 17 | ORF Stop: end of sequence |

CACCAAGCTTCCCACCATGCGGCTGCTGCTGGCCCTGTTGGGGGTCCTGCTGAGTGTGCCTGGGCCTCCAGTC
TCGTTCCTGGAGGCCTCTGAGGAAGTGGAGCTTGAGCCCTGCCTGGCTCCCAGCCTGGAGCAGCAAGAGCAGG
AGCTGACAGTAGCCCTTGGGCAGCCTGTGCGGCTGTGCTGTGGGCGGGCTGAGCGTGGTGGCCACTGGTACAA
GGAGGGCAGTCGCCTGGCACCTGCTGGCCGTGTACGGGGCTGGAGGGGCCGCCTAGAGATTGCCAGCTTCCTA
CCTGAGGATGCTGGCCGCTACCTCTGCCCGGCACGAGGCTCCATGATCGTCCTGCAGAATCTCACCTTGATTA
CAGGTGACTCCTTGACCTCCAGCAACGATGATGAGGACCCCGAGTCCCATAGGGACCTCTCGAATAGGCACAG
TTACCCCCAGCAAGCACCCTACTGGACACACCCCCAGCGCATGGAGAAGAAACTGCATGCAGTACCTGCGGGG
AACACCGTCAAGTTCCGCTGTCCAGCTGCAGGCAACCCCACGCCCACCATCCGCTGGCTTAAGGATGGACAGG
CCTTTCATGGGGAGAACCGCATTGGAGGCATTCGGCTGCGCCATCAGCACTGGAGTCTCGTGATGGAGAGCGT
GGTGCCCTCGGACCGCGGCACATACACCTGCCTGGTAGAGAACGCTGTGGGCAGCATCCGTTATAACTACCTG
CTAGATGTGCTGGAGCGGTCCCCGCACCGGCCCATCCTGCAGGCCGGGCTCCCGGCCAACACCACAGCCGTGG
TGGGCAGCGACGTGGAGCTGCTGTGCAAGGTGTACAGCGATGCCCAGCCCCACATCCAGTGGCTGAAGCACAT
CGTCATCAACGGCAGCAGCTTCGGAGCCGACGGTTTCCCCTATGTGCAAGTCCTAAAGACTGCAGACATCAAT
AGCTCAGAGGTGGAGGTCCTGTACCTGCGGAACGTGTCAGCCGAGGACGCAGGCGAGTACACCTGCCTCGCAG
GCAATTCCATCGGCCTCTCCTACCAGTCTGCCTGGCTCACGGTGCTGCCAGTGCGAGGGCAGAGGAGGACCCC
ACATGGACCGCAGCAGCGCCCGAGGCCAGGTATACGGACATCATCCTGTACGCGTCGGGCTCCCTGGCCTTGG
CTGTGCTCCTGCTGCTGGCCGGGCTGTATCGAGGGCAGGCGCTCCACGGCCGGCACCCCCGCCCGCCCGCCAC
TGTGCAGAAGCTCTCCCGCTTCCCTCTGGCCCGACAGTTCTCCCTGGAGTCAGGCTCTTCCGGCAAGTCAAGC
TCATCCCTGGTACGAGGCGTGCGTCTCTCCTCCAGCGGCCCCGCCTTGCTCGCCGGCCTCGCTGGTGCTTGGG
AAGCCCCTAGGCGAGGGCTGCTTTGGCCAGGTAGTACGTGCAGAGGCCTTTGGCATGGACCCTGCCCGGCCTG
ACCAAGCCAGCACTGTGGCCGTCAAGATGCTCAAAGACAACGCCTCTGACAAGGACCTGGCCGACCTGGTCTC
GGAGATGGAGGTGATGAAGCTGATCGGCCGACACAAGAACATCATCAACCTGCTTGGTGTCTGCACCCAGGAA
GGGCCCCTGTACGTGATCGTGGAGTGCGCCGCCAAGGGAAACCTGCGGGAGTTCCTGCGGGCCCGGCGCCCCC
CAGGCCCCGACCTCAGCCCCGACGGTCCTCGGAGCAGTGAGGGGCCGCTCTCCTTCCCAGTCCTGGTCTCCTG
CGCCTACCAGGTGGCCCGAGGCATGCAGTATCTGGAGTCCCGGAAGTGTATCCACCGGGACCTGGCTGCCCGC
AATGTGCTGGTGACTGAGGACAATGTGATGAAGATTGCTGACTTTGGGCTGGCCCGCGGCGTCCACCACATTG
ACTACTATAAGAAAACCAGCAACGGCCGCCTGCCTGTGAAGTGGATGGCGCCCGAGGCCTTGTTTGACCGGGT
GTACACACACCAGAGTGACGTGTGGTCTTTTGGGATCCCGCTATGGGAGATCTTCACCCTCGGGGGCTCCCCG
TATCCTGGCATCCCGGTGGAGGAGCTGTTCTCGCTGCTGCGGGAGGGACATCGGATGGACCGACCCCCACACT
GCCCCCCAGAGCTGTACGGGCTGATGCGTGAGTGCTGGCACGCAGCGCCCTCCCAGAGGCCTACCTTCAAGCA
GCTGGTGGAGGCGCTGGACAAGGTCCTGCTGGCCGTCTCTGAGGAGTACCTCGACCTCCGCCTGACCTTCGGA
CCCTATTCCCCCTCTGGTGGGGACGCCAGCAGCACCTGCTCCTCCAGCGATTCTGTCTTCAGCCACGACCCCC
TGCCATTGGGATCCAGCTCCTTCCCCTTCGGGTCTGGGGTGCAGACA

| | | | |
|---|---|---|---|
| NOV1s, SNP 13381615 | | | |
| Protein Sequence | SEQ ID NO: 38 | 789 aa | MW at 86689.7kD |

MRLLLALLGVLLSVPGPPVSFLEASEEVELEPCLAPSLEQQEQELTVALGQPVRLCCGRAERGGHWYKEGSRL
APAGRVRGWRGRLEIASFLPEDAGRYLCPARGSMIVLQNLTLITGDSLTSSNDDEDPESHRDLSNRHSYPQQA
PYWTHPQRMEKKLHAVPAGNTVKFRCPAAGNPTPTIRWLKDGQAFHGENRIGGIRLRHQHWSLVMESVVPSDR
GTYTCLVENAVGSIRYNYLLDVLERSPHRPILQAGLPANTTAVVGSDVELLCKVYSDAQPHIQWLKHIVINGS
SFGADGFPYVQVLKTADINSSEVEVLYLRNVSAEDAGEYTCLAGNSIGLSYQSAWLTVLPVRGQRRTPHGPQQ
RPRPGIRTSSCTRRAPWPWLCSCCWPGCIEGRRSTAGTPARPPLCRSSPASLWPDSSPWSQALPASQAHPWYE
ACVSPPAAPPCSPASLVLGKPLGEGCFGQVVRAEAFGVDPARPDQASTVAVKMLKDNASDKDLADLVSEMEVM
KLIGRHKNIINLLGVCTQEGPLYVTVECAAKGNLREFLRARRPPGPDLSPDGPRSSEGPLSFPVLVSCAYQVA
RGMQYLESRKCIHRDLAARNVLVTEDNVMKIADFGLARGVHHIDYYKKTSNGRLPVKWMAPEALFDRVYTHQS
DVWSFGIPLWEIFTLGGSPYPGIPVEELFSLLREGHRMDRPPHCPPELYGLMRECWHAAPSQRPTFKQLVEAL
DKVLLAVSEEYLDLRLTFGPYSPSGGDASSTCSSSDSVFSHDPLPLGSSSFPFGSGVQT

| | | |
|---|---|---|
| NOV1t CG101729 | SEQ ID NO: 39 | 2383 bp |
| DNA Sequence | ORF Start: ATG at 17 | ORF Stop: end of sequence |

CACCAAGCTTCCCACCATGCGGCTGCTGCTGGCCCTGTTGGGGGTCCTGCTGAGTGTGCCTGGGCCTCCAGTC
TCGTX₁CCTGGAGGCCTCTGAGGAAGTGGAGCTTGAGCCCX₂GCCTGGCTCCCAGCCTGGAGCAGCAAGAGCA
GGAGCTGACAGTAGCCCTTGGGCAGCCTGTGCGGCTGTGCTGTGGGCGGGCTGAGCGTGGTGGCCACTGGTAC
AAGGAGGGCAGTCGCCTGX₃CACCTGCTGGCCGTGTACGGGGCTGGAGGGGCCGCCTAGAGATTGCCAGCTTC
CTACCTGAGGATGCTGGCCGCTACCTCTGCCCGGCACGAGGCTCCATGATCGTCCTGCAGAATCTCACCTTGA
TTACAGGTGACTCCTTGACCTCCAGCAACGATGATGAGGACCCCGAGTCCCATAGGGACCTCTCGAATAGGCA
CAGTTACCCCCAGCAAGCACCCTACTGGACACACCCCCAGCGCATGGAGAAGAAACTGCATGCAGTACCTGCG
GGGAACACCGTCAAGTTCCGCTGTCCAGCTGCAGGCAACCCCACGCCCACCATCCGCTGGCTTAAGGATGGAC
AGGCCTTTCATGGGGAGAACCGCATTGGAGGCATTCGGCTGCGCCATCAGCACTGGAGTCTCGTGATGGAGAG
CGTGGTGCCCTCGGACCGCGGCACATACACCTGCCTGGTAGAGAACGCTGTGGGCAGCATCCGTTATAACTAC
CTGCTAGATGTGCTGGAGCGGTCCCCGCACCGGCCCATCCTGCX₄GGCCGGGCTCCCGGCCAACACCACAGCC
GTGGTGGGCAGCGACGTGGAGCX₅GCTGTGCAAGGTGTACAGCGATGCCCAGCCCCACATCCAGX₆GGCTGAA
GCX₇CATCGTCATCAACGGCAGCAGCTTCGGAGCCGACGGTTTCCCCTATGTGCAAGTCCTAAAGACTGCAGA
CATCAATAGCTCAGAGGTGGAGGTCCTGTACCTGCGGAACGTGTCAGCCGAGGACGCAGGCGAGTACACCTGC
CTCGCAGGCAATTCCATCGGCCTCTCCTACCAGTCTGCCTGGCTCACGGTGCTGCCAGTGCGAGGGCAGAGGA
GGACCCCACATGGACCGCAGCAGCGCCCGAGGCCAGGTATACGGACATCATCCTGTACGCGTCGGGCTCCCTG
GCCTTGGCTGTGCTCCTGCTGCTGGCCGGGCTGTATCGAGGGCAGGCGCTCCACGGCCGGCACCCCCGCCCGC
CCGCCACTGTGCAGAAGCTCTCCCGCTX₈CCCTCTGGCCCGACAGTX₉CTCCCX₁₀GGAGTCAGX₁₁CTCTTC
CGGCAAGTCAAGCTCATCCCTGGTACGAGGCGTGCGTCTCTCCTCCAGCGGCCCCGCCTTGCTCGCCGGCCTC
GCTGGTGCTTGGGAAGCCCCTAGGCGAGGGCTGCTTTGGCCAGGTAGTACGTGCAGAGGCCTTTGGCX₁₂TGG
ACCCTGCCCGGCCTGACCAAGCCAGCACTGTGGCCGTCAAGATGCTCAAAGACAACGCCTCTGACAAGGACCT
GGCCGACCTGGTCTCGGAGATGGAGGTGATGAAGCTGATCGGCCGACACAAGAACATCATCAACCTGCTTGGT
GTCTGCACCCAGGAAGGGCCCCTGTACGTGATCX₁₃X₁₄GX₁₅AGTGCGCCGCCAAGGGAAACCTGCGGGAGT
TCCTGCGGGCCCGGCGCCCCCCAGGCCCCGACCTCAGCCCCGACGGTCCTCGGAGCAGTGAGGGGCCGCTCTC
CTTCCCAGTCCTGGTCTCCTGCGCCTACCAGGTGGCCCGAGGCX₁₆TGCAGTATCTGGAGTCCCGGAAGTGTA
TCCACCGGGACCTGGCTGCCCGCAATGTGCTGGTGACTGAGGACAATGTGATGAAGATTGCTGACTTTGGGCT
GGCCCGCGGCGTCCACCACATTGACTACTATAAGAAAACCAGCAACGGCCGCCTGCCTGTGAAGTGGATGGCG
CCCGAGGCCTTGTTTGACCGGGTGTACACACACCAGAGTGACGTGTGGTCTTTTGGGATCCCGCTATGGGAGA
TCTTCACCCTCGGGGGCTCCCCGTATCCTGGCATCCCGGTGGAGGAGCTGTTCTCGCTGCTGCGGGAGGGACA
TCGGATGGACCGACCCCCACACTGCCCCCCAGAGCTGTACGGGCTGATGCGTGAGTGCTGGCACGCAGCGCCC
X₁₇CCCAGAGGCCTACCTTCAAGCAGCTGGTGGAGGCGCTGGACAAGGTCCTGCTGGCCGTCTCTGAGGAGTA
CCTCGACCTCCGCCTGX₁₈CCTTCGGACCCTATTCCCCCTCTGGTGGGGACGCCAGCAGCACCTGCTCCTCCA
GCGATTCTGTCTTCAGCCACGACCCCCTGCCATTGGGATCCAGCTCCTTCCCCTTCGGGTCTGGGGTGCAGAC
A
[Wherein each of residues X₁, X₂, X₅, X₆, X₈, X₉, X₁₀, X₁₄, X₁₇ is either
C or T; and each of residues X₃, X₄, X₇, X₁₁, X₁₂, X₁₃, X₁₅, X₁₆, X₁₈ is
either G or A;]

| | | | |
|---|---|---|---|
| NOV1t, CG101729 | | | |
| Protein Sequence | SEQ ID NO: 40 | 789 aa | MW at approx 86629.6kD |

MRLLLALLGVLLSVPGPPVB₁Z₁LEASEEVELEPZ₂LAPSLEQQEQELTVALGQPVRLCCGRAERGGHWYKEG
SRLZ₃PAGRVRGWRGRLEIASFLPEDAGRYLCB₂ARGSMIVLQNLTLITGDSLTSSNDDEDPB₃SHRDB₄SNR
HSYPQQAPYWTHPQRMEKKLHAVPAGNTVKFRCPAAGNPTPTIRWLKDGQAFHGENRIGGIRLRHQHWSLVME
SVVPSDRGTYTCLVENAVGSIRYNYLLDVLERSPHRPILZ₄AGLPANTTAVVGSDVEZ₅LCKVYSDAQPHIQ
Z₆LKZ₇IVINGSSFGAB₅GFPYVQVLKTADINSSEVEVLYLRNVSAEDAGEYTCLAGNSIGLSYQSAWLTVLP
VRGQRRTPHGPQQRPRPGIRTSSCTRRAPWPWLCSCCWPGCIEGRRSTAGTPARPPLCRSSPAZ₈LWPDSZ₉P
Z₁₀SQZ₁₁LPASQAHPWYEACVSPPAAPPCSPASLVLGKPLGEGCFGQVVRAEAFGZ₁₂DPARPDQASTVAVK
MLKDNASDKDLADLVSEMEVMKLIGRHKNIINLLGVCTQEGPLYVIZ₁₃Z₁₄CAAKGNLREFLRARRPPGPDL
SPDGPRSSEGPLSFPVLVSCAYQVARGZ₁₅QYLESRKCIHRDLAARNVLVTEDNVMKIADFGLARGVHHIDYY
KKTSNGRLPVKWMAPEALFDRVYTHQSDVWSFGIPB₆WEIFTLGGSPYPGIPVEELFSLLREGHRMDRPPHCP
PELYGLMRECWHAAPZ₁₆QRPTFKQLVEALDKVLLAVSEEYLDLRLZ₁₇FGPYSPSGGDASSTCSSSDSVFSH
DPLPLGSSSFPFGSGVQT
[Wherein residue Z₁ is S or F; Z₂ is C or R; Z₃ is A or T; Z₄ is Q or R; Z₅ is L or P; Z₆ is W or R; Z₇ is
H or R; Z₈ is S or P; Z₉ is S or P; Z₁₀ is W or R; Z₁₁ is A or T; Z₁₂ is M or V; Z₁₃ is M or V or A; Z₁₄ is E
or K; Z₁₅ is M or V; Z₁₆ is S or P; Z₁₇ is T or A; B₁ is L or S; B₂ is L or P; B₃ is K or E; B₄ is L or P; B₅ is
V or D; and B₆ is L or P.]

[0292] Further analysis of the NOV1 a protein yielded the following properties shown in Table 1B.

TABLE 1B
Protein Sequence Properties NOV1a

| SignalP | Cleavage site between residues 22 and 23 | | | |
|---|---|---|---|---|
| analysis: | | | | |
| PSORT II | PSG: a new signal peptide prediction method | | | |
| analysis: | N-region: length 2; pos. chg 1; neg. chg 0 | | | |
| | H-region: length 20; peak value 10.04 | | | |
| | PSG score: 5.54 | | | |
| | GvH: von Heijne's method for signal seq. recognition | | | |
| | GvH score (threshold: −2.1): 0.32 | | | |
| | possible cleavage site: between 15 and 16 | | | |
| | >>> Seems to have a cleavable signal peptide (1 to 15) | | | |
| | ALOM: Klein et al's method for TM region allocation | | | |
| | Init position for calculation: 16 | | | |
| | Tentative number of TMS(s) for the threshold 0.5: 0 | | | |
| | number of TMS(s) . . . fixed | | | |
| | PERIPHERAL Likelihood = 3.18 (at 520) | | | |
| | ALOM score: 3.18 (number of TMSs: 0) | | | |
| | MTOP: Prediction of membrane topology (Hartmann et al.) | | | |
| | Center position for calculation: 7 | | | |
| | Charge difference: −7.0 C(−5.0)-N(2.0) | | | |
| | N >= C: N-terminal side will be inside | | | |
| | MITDISC: discrimination of mitochondrial targeting seq | | | |
| | R content: | 1 | Hyd Moment(75): | 6.09 |
| | Hyd Moment(95): | 8.95 | G content: | 2 |
| | D/E content: | 1 | S/T content: | 3 |

Score: −3.80
Gavel: prediction of cleavage sites for mitochondrial preseq
R-2 motif at 12 MRL|LL
NUCDISC: discrimination of nuclear localization signals
pat4: none
pat7: none
bipartite: none
content of basic residues: 10.0%
NLS Score: −0.47
NNCN: Reinhardt's method for Cytoplasmic/Nuclear discrimination
Prediction: nuclear
Reliability: 55.5
COIL: Lupas's algorithm to detect coiled-coil regions
total: 0 residues
Final Results (k = 9/23):
55.6%: extracellular, including cell wall
22.2%: nuclear
11.1%: vacuolar
11.1%: mitochondrial
>> prediction for CG101729-02 is exc (k = 9)

[0293] A search of the NOV1a protein against the Geneseq database, a proprietary database that contains sequences published in patents and patent publication, yielded several homologous proteins shown in Table 1C.

TABLE 1C
Geneseq Results for NOV1a

| | | NOV1a | Identities/ | |
|---|---|---|---|---|
| | | Residues/ | Similarities for | |
| Geneseq | Protein/Organism/Length [Patent #, | Match | the Matched | Expect |
| Identifier | Date] | Residues | Region | Value |
| ABR58627 | Human cancer related protein SEQ ID | 1 . . . 789 | 706/802 (88%) | 0.0 |
| | NO: 284 - Homo sapiens, 802 aa. | 1 . . . 802 | 719/802 (89%) | |
| | [WO2003025138-A2, 27 MAR. 2003] | | | |
| ABR58628 | Human cancer related protein SEQ ID | 1 . . . 789 | 706/789 (89%) | 0.0 |
| | NO: 285 - Homo sapiens, 762 aa. | 1 . . . 762 | 712/789 (89%) | |
| | [WO2003025138-A2, 27 MAR. 2003] | | | |
| AAE16588 | Human fibroblast growth factor receptor | 1 . . . 789 | 704/802 (87%) | 0.0 |
| | 4 (FGR4) protein - Homo sapiens, 802 | 1 . . . 802 | 717/802 (88%) | |
| | aa. [US6326472-B1, 04 DEC. 2001] | | | |
| ABB81922 | Human fibroblast growth factor receptor | 1 . . . 482 | 398/495 (80%) | 0.0 |
| | protein 4 - Homo sapiens, 495 aa. | 1 . . . 495 | 411/495 (82%) | |
| | [WO200257312-A2, 25 JUL. 2002] | | | |
| AAR26278 | Tyrosine Kinase receptor - Homo | 454 . . . 786 | 331/333 (99%) | 0.0 |
| | sapiens, 426 aa. [DE4104240-A, | 69 . . . 401 | 331/333 (99%) | |
| | 13 AUG. 1992] | | | |

[0294] In a BLAST search of public sequence databases, the NOV1a protein was found to have homology to the proteins shown in the BLASTP data in Table 1D.

TABLE 1D
Public BLASTP Results for NOV1a

| | | NOV1a | Identities/ | |
|---|---|---|---|---|
| Protein | | Residues/ | Similarities for | |
| Accession | | Match | the Matched | Expect |
| Number | Protein/Organism/Length | Residues | Portion | Value |
| Q8TDA0 | Fibroblast growth factor receptor 4 - | 1 . . . 789 | 706/802 (88%) | 0.0 |
| | Homo sapiens (Human), 802 aa. | 1 . . . 802 | 719/802 (89%) | |
| E980166 | TRYSINE KINASE RECEPTOR | 1 . . . 789 | 704/803 (87%) | 0.0 |
| | PROTEIN SEQUENCE - vectors, 801 | 1 . . . 801 | 717/803 (88%) | |
| | aa. | | | |
| P22455 | Fibroblast growth factor receptor 4 | 1 . . . 789 | 705/802 (87%) | 0.0 |
| | precursor (EC 2.7.1.112) (FGFR-4) - | 1 . . . 802 | 718/802 (88%) | |
| | Homo sapiens (Human), 802 aa. | | | |
| AAF27432 | Fibroblast growth factor receptor 4, | 1 . . . 789 | 704/789 (89%) | 0.0 |
| | soluble-form splice variant - Homo | 1 . . . 762 | 710/789 (89%) | |
| | sapiens (Human), 762 aa. | | | |
| TVHUF4 | fibroblast growth factor receptor 4 | 1 . . . 789 | 704/802 (87%) | 0.0 |
| | precursor - human, 802 aa. | 1 . . . 802 | 717/802 (88%) | |

[0295] PFam analysis predicts that the NOV1 a protein contains domains as shown in the Table 1E. Specific amino acid residues of NOV1a for each domain is shown in column 2, equivalent domains in the other NOV1 proteins of the invention are also encompassed herein.

TABLE 1E
Domain Analysis of NOV1a

| | | Identities/ | |
|---|---|---|---|
| | | Similarities | |
| | NOV1a Match Region | for the | Expect |
| Pfam Domain | Amino acid residues: | Matched Region | Value |
| ig | 165 . . . 226 | 21/65 (32%) | 3.7e−09 |
| | | 49/65 (75%) | |
| ig | 264 . . . 335 | 19/75 (25%) | 9.7e−06 |
| | | 49/75 (65%) | |
| pkinase | 454 . . . 727 | 98/319 (31%) | 2.3e−86 |
| | | 235/319 (74%) | |

### Example 2

### NOV2, CG124800, Complement Facotr 1 Precursor

[0296] The present invention encompasses NOV2, a novel protein bearing sequence similarity to COMPLEMENT FACTOR I PRECURSOR, nucleic acids that encode this protein or fragments thereof, and antibodies that bind immunospecifically to NOV2.

[0297] C3 inactivator, or factor I (‘eye’), is a proteolytic enzyme that destroys the hemolytic and immune-adherence activities of cell-bound, activated C3. Patients with type I essential hypercatabolism of C3′ were homozygous for an inherited deficiency of C3 inactivator and relatives had values for the inactivator about 50% of normal (Proc. Nat. Acad. Sci. 69: 2910-2913, 1972; J. Immun. 107: 19-27, 1971; Clin. Exp. Immun. 27: 23-29,1977; Quart. J. Med. 87: 385-401, 1994). Patients had recurrent pyogenic infections, self-limiting vasculitic illness and neisserial infections. Polymorphism of C3b inactivator (“Factor I”, Nomenclature Committee of the IUIS, J. Immun. 127: 1261-1262, 1981) has been described (Hum. Genet. 71: 45-48, 1985). A variant, tentatively designated FI*C was described found as a result 305 patient sera (Hum. Genet. 82: 393, 1989). Factor I is composed of 2 disulfide-linked polypeptide chains with molecular weights of 50,000 and 38,000 daltons. It is synthesized as a single-chain precursor which undergoes intracellular proteolytic processing.

[0298] The factor I gene has been mapped to chromosome 4, specifically 4q25 (J. Biol. Chem. 262: 10065-10071, 1987),

[0299] The NOV2 clone was analyzed, and the nucleotide and encoded polypeptide sequences are shown in Table 2A.

TABLE 2A
NOV2 Sequence Analysis

| | | |
|---|---|---|
| NOV2a, CG124800-02 | SEQ ID NO: 41 | 1942 bp |
| DNA Sequence | ORF Start: ATG at 15 | ORF Stop: TAA at 1743 |

CGAACACCTCCAACATGAAGCTTCTTCATGTTTTCCTGTTATTTCTGTGCTTCCACTTAAGGTTTTGCAAGGT
CACTTATACATCTCAAGAGGATCTGGTGGAGAAAAAGTGCTTAGCAAAAAAATATACTCACCTCTCCTGCGAT
AAAGTCTTCTGCCAGCCATGGCAGAGATGCATTGAGGGCACCTGTGTTTGTAAACTACCGTATCAGTGCCCAA
AGAATGGCACTGCAGTGTGTGCAACTAACAGGAGAAGCTTCCCAACATACTGTCAACAAAAGAGTTTGGAATG
TCTTCATCCAGGGACAAAGTTTTTAAATAACGGAACATGCACAGCCGAAGGAAAGTTTAGTGTTTCCTTGAAG
CATGGAAATACAGATTCAGAGGGAATAGTTGAAGTAAAACTTGTGGACCAAGATAAGACAATGTTCATATGCA
AAAGCAGCTGGAGCATGAGGGAAGCCAACGTGGCCTGCCTTGACCTTGGGTTTCAACAAGGTGCTGATACTCA
AAGAAGGTTTAAGTTGTCTGATCTCTCTATAAATTCCACTGAATGTCTACATGTGCATTGCCGAGGATTAGAG
ACCAGTTTGGCTGAATGTACTTTTACTAAGAGAAGAACTATGGGTTACCAGGATTTCGCTGATGTGGTTTGTT
ATACACAGAAAGCAGATTCTCCAATGGATGACTTCTTTCAGTGTGTGAATGGGAAATACATTTCTCAGATGAA
AGCCTGTGATGGTATCAATGATTGTGGAGACCAAAGTGATGAACTGTGTTGTAAAGCATGCCAAGGCAAAGGC
TTCCATTGCAAATCGGGTGTTTGCATTCCAAGCCAGTATCAATGCAATGGTGAGGTGGACTGCATTACAGGGG
AAGATGAAGTTGGCTGTGCAGAAGAAACAGAAATTTTGACTGCTGACATGGATGCAGAAAGAAGACGGATAAA
ATCATTATTACCTAAACTATCTTGTGGAGTTAAAAACAGAATGCACATTCGAAGGAAACGAATTGTGGGAGGA
AAGCGAGCACAACTGGGAGACCTCCCATGGCAGGTGGCAATTAAGGATGCCAGTGGAATCACCTGTGGGGGAA
TTTATATTGGTGGCTGTTGGATTCTGACTGCTGCACATTGTCTCAGAGCCAGTAAAACTCATCGTTACCAAAT
ATGGACAACAGTAGTAGACTGGATACACCCCGACCTTAAACGTATAGTAATTGAATACGTGGATAGAATTATT
TTCCATGAAAACTACAATGCAGGCACTTACCAAAATGACATCGCTTTGATTGAAATGAAAAAAGACGGAAACA
AAAAAGATTGTGAGCTGCCTCGTTCCATCCCTGCCTGTGTCCCCTGGTCTCCTTACCTATTCCAACCTAATGA
TACATGCATCGTTTCTGGCTGGGGACGAGAAAAAGATAACGAAAGAGTCTTTTCACTTCAGTGGGGTGAAGTT
AAACTAATAAGCAACTGCTCTAAGTTTTACGGAAATCGTTTCTATGAAAAAGAAATGGAATGTGCAGGTACAT
ATGATGGTTCCATCGATGCCTGTAAAGGGGACTCTGGAGGCCCCTTAGTCTGTATGGATGCCAACAATGTGAC
TTATGTCTGGGGTGTTGTGAGTTGGGGGGAAAACTGTGGAAAACCAGAGTTCCCAGGTTTTTACACCAAAGTG
GCCAATTATTTTGACTGGATTAGCTACCATGTAGGAAGGCCTTTTATTTCTCAGTACAATGTATAAAATTGTG
ATCTCTCTCTTCATTCTATTCTTTTTCTCTCAAGAGTTCCATTTAATGGAAATAAAACGGTATAATTAATAAT
TCTCTAGGGGGGAAAAATGAAGCAAATCTCATTGGATATTTTTAAAGGTCTCCACAGAGTTTATGCCATATTG
GAATTTTGTTGTATAATTCTCAAATAAATATTTTGGTGAAGCAT

| | | | |
|---|---|---|---|
| NOV2a, GG124800-02 | | | |
| Protein Sequence | SEQ ID NO: 42 | 576 aa | MW at 65106.9kD |

MKLLHVFLLFLCFHLRFCKVTYTSQEDLVEKKCLAKKYTHLSCDKVFCQPWQRCIEGTCVCKLPYQCPKNGTA
VCATNRRSFPTYCQQKSLECLHPGTKFLNNGTCTAEGKFSVSLKHGNTDSEGIVEVKLVDQDKTMFICKSSWS
MREANVACLDLGFQQGADTQRRFKLSDLSINSTECLHVHCRGLETSLAECTFTKRRTMGYQDFADVVCYTQKA
DSPMDDFFQCVNGKYISQMKACDGINDCGDQSDELCCKACQGKGFHCKSGVCIPSQYQCNGEVDCITGEDEVG
CAEETEILTADMDAERRRIKSLLPKLSCGVKNRMHIRRKRIVGGKRAQLGDLPWQVAIKDASGITCGGIYIGG
CWILTAAHCLRASKTHRYQIWTTVVDWIHPDLKRIVIEYVDRIIFHENYNAGTYQNDIALIEMKKDGNKKDCE
LPRSIPACVPWSPYLFQPNDTCIVSGWGREKDNERVFSLQWGEVKLISNCSKFYGNRFYEKEMECAGTYDGSI
DACKGDSGGPLVCMDANNVTYVWGVVSWGENCGKPEFPGFYTKVANYFDWISYHVGRPFISQYNV

[0300] Further analysis of the NOV2a protein yielded the following properties shown in Table 2B.

TABLE 2B
Protein Sequence Properties NOV2a

| SignalP | Cleavage site between residues 19 and 20 | | | |
|---|---|---|---|---|
| analysis: | | | | |
| PSORT II | PSG: a new signal peptide prediction method | | | |
| analysis: | N-region: length 2; pos. chg 1; neg. chg 0 | | | |
| | H-region: length 13; peak value 12.61 | | | |
| | PSG score: 8.21 | | | |
| | GvH: von Heijne's method for signal seq. recognition | | | |
| | GvH score (threshold: −2.1): −2.39 | | | |
| | possible cleavage site: between 18 and 19 | | | |
| | >>> Seems to have no N-terminal signal peptide | | | |
| | ALOM: Klein et al's method for TM region allocation | | | |
| | Init position for calculation: 1 | | | |
| | Tentative number of TMS(s) for the threshold 0.5: 1 | | | |
| | Number of TMS(s) for threshold 0.5: 0 | | | |
| | PERIPHERAL Likelihood = 0.90 (at 356) | | | |
| | ALOM score: −1.01 (number of TMSs: 0) | | | |
| | MTOP: Prediction of membrane topology (Hartmann et al.) | | | |
| | Center position for calculation: 6 | | | |
| | Charge difference: −2.0 C(0.5)-N(2.5) | | | |
| | N >= C: N-terminal side will be inside | | | |
| | MITDISC: discrimination of mitochondrial targeting seq | | | |
| | R content: | 1 | Hyd Moment(75): | 2.70 |
| | Hyd Moment(95): | 7.92 | G content: | 0 |
| | D/E content: | 1 | S/T content: | 3 |

Score: −3.44
Gavel: prediction of cleavage sites for mitochondrial preseq
R-2 motif at 26 LRF|CK
NUCDISC: discrimination of nuclear localization signals
pat4: RRKR (5) at 329
pat7: none
bipartite: none
content of basic residues: 12.2%
NLS Score: −0.16
NNCN: Reinhardt's method for Cytoplasmic/Nuclear discrimination
Prediction: cytoplasmic
Reliability: 76.7
COIL: Lupas's algorithm to detect coiled-coil regions
total: 0 residues
Final Results (k = 9/23):
22.2%: extracellular, including cell wall
22.2%: mitochondrial
11.1%: cytoplasmic
11.1%: nuclear
11.1%: Golgi
11.1%: vacuolar
11.1%: endoplasmic reticulum
>> prediction for CG124800-02 is exc (k = 9)

[0301] A search of the NOV2a protein against the Geneseq database, a proprietary database that contains sequences published in patents and patent publication, yielded several homologous proteins shown in Table 2C.

TABLE 2C
Geneseq Results for NOV2a

| | | NOV2a | Identities/ | |
|---|---|---|---|---|
| | | Residues/ | Similarities for | |
| Geneseq | Protein/Organism/Length [Patent #, | Match | the Matched | Expect |
| Identifier | Date] | Residues | Region | Value |
| AAG03718 | Human secreted protein, SEQ ID NO: | 1 . . . 109 | 108/109 (99%) | 2e−63 |
| | 7799 - Homo sapiens, 115 aa. | 1 . . . 109 | 108/109 (99%) | |
| | [EP1033401-A2, 06 SEP. 2000] | | | |
| AAE23083 | Epithin protein - Unidentified, 855 aa. | 227 . . . 567 | 114/368 (30%) | 4e−45 |
| | [WO200203787-A2, 17 JAN. 2002] | 494 . . . 854 | 170/368 (45%) | |
| ABP72376 | Transmembrane serine protease 1 | 227 . . . 567 | 116/369 (31%) | 2e−44 |
| | (MTSP1) - Homo sapiens, 855 aa. | 494 . . . 854 | 169/369 (45%) | |
| | [WO2003004681-A2, 16 JAN. 2003] | | | |
| ABP56619 | Human membrane-type serine protease | 227 . . . 567 | 116/369 (31%) | 2e−44 |
| | MTSP1 protein SEQ ID NO: 2 - Homo | 494 . . . 854 | 169/369 (45%) | |
| | sapiens, 855 aa. [WO200292841-A2, | | | |
| | 21 NOV. 2002] | | | |
| AAE29820 | Human membrane-type serine protease 1 | 227 . . . 567 | 116/369 (31%) | 2e−44 |
| | (MTSP1) - Homo sapiens, 855 aa. | 494 . . . 854 | 169/369 (45%) | |
| | [WO200277267-A2, 03 OCT. 2002] | | | |

[0302] In a BLAST search of public sequence databases, the NOV2a protein was found to have homology to the proteins shown in the BLASTP data in Table 2D.

TABLE 2D
Public BLASTP Results for NOV2a

| | | NOV2a | Identities/ | |
|---|---|---|---|---|
| Protein | | Residues/ | Similarities for | |
| Accession | | Match | the Matched | Expect |
| Number | Protein/Organism/Length | Residues | Portion | Value |
| P05156 | Complement factor I precursor (EC | 1 . . . 576 | 575/583 (98%) | 0.0 |
| | 3.4.21.45) (C3B/C4B inactivator) - | 1 . . . 583 | 575/583 (98%) | |
| | Homo sapiens (Human), 583 aa. | | | |
| Q9WUW3 | Complement factor I precursor (EC | 1 . . . 576 | 415/605 (68%) | 0.0 |
| | 3.4.21.45) (C3B/C4B inactivator) - | 1 . . . 604 | 472/605 (77%) | |
| | Rattus norvegicus (Rat), 604 aa. | | | |
| Q61129 | Complement factor I precursor (EC | 1 . . . 576 | 408/604 (67%) | 0.0 |
| | 3.4.21.45) (C3B/C4B inactivator) - Mus | 1 . . . 603 | 467/604 (76%) | |
| | musculus (Mouse), 603 aa. | | | |
| Q8WW88 | Similar to I factor (Complement) - | 1 . . . 344 | 342/351 (97%) | 0.0 |
| | Homo sapiens (Human), 377 aa. | 1 . . . 351 | 343/351 (97%) | |
| CAA68417 | Heavy chain of factor I - Homo sapiens | 19 . . . 332 | 314/321 (97%) | 0.0 |
| | (Human), 321 aa. | 1 . . . 321 | 314/321 (97%) | |

[0303] PFam analysis predicts that the NOV2a protein contains the domains shown in the Table 2E.

TABLE 2E
Domain Analysis of NOV2a

| | | Identities/ | |
|---|---|---|---|
| | | Similarities | |
| | NOV3a Match Region | for the | Expect |
| Pfam Domain | Amino Acid residues: | Matched Region | Value |
| SRCR | 117 . . . 215 | 34/115 (30%) | 1.9e−33 |
| | | 92/115 (80%) | |
| ldl_recept_a | 220 . . . 258 | 17/43 (40%) | 8.8e−06 |
| | | 28/43 (65%) | |
| ldl_recept_a | 259 . . . 295 | 17/43 (40%) | 1.2e−11 |
| | | 29/43 (67%) | |
| trypsin | 333 . . . 562 | 95/264 (36%) | 5.2e−81 |
| | | 182/264 (69%) | |

### Example 3

### NOV3, CG185793: MMP15

[0304] The present invention encompasses NOV3, a novel protein bearing sequence similarity to MATRIX METALLOPROTEINASE-15, nucleic acids that encode this protein or fragments thereof, and antibodies that bind immunospecifically to NOV3.

[0305] Matrix metalloproteinases (MMPs) are zinc-binding endopeptidases that degrade various components of the extracellular matrix. They have been implicated in normal and pathologic processes including tissue remodeling, wound healing, angiogenesis, and tumor invasion. MMPs have different substrate specificities and are encoded by different genes. MMP15 has been isolated from a human lung cDNA library and has 73.9% sequence similarity to MMP14 (600754), a membrane-localized MMP that also contains a C-terminal transmembrane segment. MMP15-specific antibodies have detected a 72-kD protein in lung cell membranes and demonstrated by Northern blotting that MMP15 is widely expressed as a 3.6-kb transcript, particularly in liver, placenta, testis, colon, and intestine (Europ. J. Biochem. 231: 602-608, 1995). The MMP15 gene has been mapped to chromosome 6q13-q21 by isotopic in situ hybridization (Genomics 40: 168-169, 1997) but to 16q12.2-q21 by fluorescence in situ hybridization (Genomics 39: 412-413,1997).

[0306] NOV3 is a splice form of MATRIX METALLOPROTEINASE-15 as indicated by residues 94E to 191Q. This new variant contains a deletion of 154 nucleotides from coding exon 2, has the same nucleotides in exon 3 and a novel insertion of exon 4 of 133 nucleotides changing the amino acid sequence in exon 3 and 4. The NOV3 clone was analyzed, and the nucleotide and encoded polypeptide sequences are shown in Table 3A.

TABLE 3A
NOV3 Sequence Analysis

| | | |
|---|---|---|
| NOV3a, CG185793-02 | SEQ ID NO: 43 | 1674 bp |
| DNA Sequence | ORF Start: ATG at 1 | ORF Stop: TGA at 1672 |

ATGAAGCGGCCCCGCTGTGGGGTGCCAGACCAGTTCGGGGTACGAGTGAAAGCCAACCTGCGGCGGCGTCGGA
AGCGCTACGCCCTCACCGGGAGGAAGTGGAACAACCACCATCTGACCTTTAGCATCCAGAACTACACGGAGAA
GTTGGGCTGGTACCACTCGATGGAGGCGGTGCGCAGGGCCTTCCGCGTGTGGGAGCAGGCCACGCCCCTGGTC
TTCCAGGAGGTGCCCTATGAGGACATCCGGCTGCGGCGACAGAAGGAGGCCGACATCATGGAAACAACCTCTT
CCTGGTGGCAGTGCATGAGCTGGGCCACGCGCTGGGGCTGGAGCACTCCAGCAACCCCAATGCCATCATGGCG
CCGTTCTACCAGTGGAAGGACGTTGACAACTTCAAGCTGCCCGAGGACGATCTCCGTGGCATCCAGCAGCTCT
ACGCAACTTGGAAATGCAGAGTCCAAAACGCCTGAAGCCAGGGCCTGGAGCCTCTGCTGGAGCAGGCTGGCAT
CCCAAGGGGAATGTCCCCAAGGGGACATGCAGGCAGACACCCTCAGGAGCACAGTGACCCAAGGTACCCCAGA
CGGTCAGCCACAGCCTACCCAGCCTCTCCCCACTGTGACGCCACGGCGGCCAGGCCGGCCTGACCACCGGCCG
CCCCGGCCTCCCCAGCCACCACCCCCAGGTGGGAAGCCAGAGCGGCCCCCAAAGCCGGGCCCCCCAGTCCAGC
CCCGAGCCACAGAGCGGCCCGACCAGTATGGCCCCAACATCTGCGACGGGGACTTTGACACAGTGGCCATGCT
TCGCGGGGAGATGTTCGTGTTCAAGGGCCGCTGGTTCTGGCGAGTCCGGCACAACCGCGTCCTGGACAACTAT
CCCATGCCCATCGGGCACTTCTGGCGTGGTCTGCCCGGTGACATCAGTGCTGCCTACGAGCGCCAAGACGGTC
GTTTTGTCTTTTTCAAAGGTGACCGCTACTGGCTCTTTCGAGAAGCGAACCTGGAGCCCGGCTACCCACAGCC
GCTGACCAGCTATGGCCTGGGCATCCCCTATGACCGCATTGACACGGCCATCTGGTGGGAGCCCACAGGCCAC
ACCTTCTTCTTCCAAGAGGACAGGTACTGGCGCTTCAACGAGGAGACACAGCGTGGAGACCCTGGGTACCCCA
AGCCCATCAGTGTCTGGCAGGGGATCCCTGCCTCCCCTAAAGGGGCCTTCCTGAGCAATGACGCAGCCTACAC
CTACTTCTACAAGGGCACCAAATACTGGAAATTCGACAATGAGCGCCTGCGGATGGAGCCCGGCTACCCCAAG
TCCATCCTGCGGGACTTCATGGGCTGCCAGGAGCACGTGGAGCCAGGCCCCCGATGGCCCGACGTGGCCCGGC
CGCCCTTCAACCCCCACGGGGGTGCAGAGCCCGGGGCGGACAGCGCAGAGGGCGACGTGGGGGATGGGGATGG
GGACTTTGGGGCCGGGGTCAACAAGGACGGGGGCAGCCGCGTGGTGGTGCAGATGGAGGAGGTGGCACGGACG
GTGAACGTGGTGATGGTGCTGGTGCCACTGCTGCTGCTGCTCTGCGTCCTGGGCCTCACCTACGCGCTGGTGC
AGATGCAGCGCAAGGGTGCGCCACGTGTCCTGCTTTACTGCAAGCGCTCGCTGCAGGAGTGGGTCTGA

| | | | |
|---|---|---|---|
| NOV3a, CG185793-02 | | | |
| Protein Sequence | SEQ ID NO: 44 | 557 aa | MW at 63707.6kD |

MKRPRCGVPDQFGVRVKANLRRRRKRYALTGRKWNNHHLTFSIQNYTEKLGWYHSMEAVRRAFRVWEQATPLV
FQEVPYEDIRLRRQKEADIMETTSSWWQCMSWATRWGWSTPATPMPSWRRSTSGRTLTTSSCPRTISVASSSS
TQLGNAESKTPEARAWSLCWSRLASQGECPQGDMQADTLRSTVTQGTPDGQPQPTQPLPTVTPRRPGRPDHRP
PRPPQPPPPGGKPERPPKPGPPVQPRATERPDQYGPNICDGDFDTVAMLRGEMFVFKGRWFWRVRHNRVLDNY
PMPIGHFWRGLPGDISAAYERQDGRFVFFKGDRYWLFREANLEPGYPQPLTSYGLGIPYDRIDTAIWWEPTGH
TFFFQEDRYWRFNEETQRGDPGYPKPISVWQGIPASPKGAFLSNDAAYTYFYKGTKYWKFDNERLRMEPGYPK
SILRDFMGCQEHVEPGPRWPDVARPPFNPHGGAEPGADSAEGDVGDGDGDFGAGVNKDGGSRVVVQMEEVART
VNVVMVLVPLLLLLCVLGLTYALVQMQRKGAPRVLLYCKRSLQEWV

[0307] Further analysis of the NOV3a protein yielded the following properties shown in Table 3B.

TABLE 3C
Protein Sequence Properties NOV3a

| SignalP | No Known Signal Sequence Predicted | | | |
|---|---|---|---|---|
| analysis: | | | | |
| PSORT II | PSG: a new signal peptide prediction method | | | |
| analysis: | N-region: length 10; pos. chg 3; neg. chg 1 | | | |
| | H-region: length 4; peak value −7.16 | | | |
| | PSG score: −11.56 | | | |
| | GvH: von Heijne's method for signal seq. recognition | | | |
| | GvH score (threshold: −2.1): −12.22 | | | |
| | possible cleavage site: between 51 and 52 | | | |
| | >>> Seems to have no N-terminal signal peptide | | | |
| | ALOM: Klein et al's method for TM region allocation | | | |
| | Init position for calculation: 1 | | | |
| | Tentative number of TMS(s) for the threshold 0.5: 1 | | | |
| | Number of TMS(s) for threshold 0.5: 1 | | | |
| | INTEGRAL | Likelihood = | −14.28 | Transmembrane 514-530 |
| | PERIPHERAL | Likelihood = | 9.65 (at 392) | |
| | ALOM score: −14.28 (number of TMSs: 1) | | | |
| | MTOP: Prediction of membrane topology (Hartmann et al.) | | | |
| | Center position for calculation: 521 | | | |
| | Charge difference: 6.0 C(5.0)-N(−1.0) | | | |
| | C > N: C- terminal side will be inside | | | |
| | >>> Single TMS is located near the C-terminus | | | |
| | >>> membrane topology: type Nt (cytoplasmic tail 1 to 513) | | | |
| | MITDISC: discrimination of mitochondrial targeting seq | | | |
| | R content: | 9 | Hyd Moment(75): | 2.84 |
| | Hyd Moment(95): | 6.43 | G content: | 3 |
| | D/E content: | 2 | S/T content: | 4 |

```
Score: 0.53
Gavel: prediction of cleavage sites for mitochondrial preseq
R-2 motif at 42 GRK|WN
NUCDISC: discrimination of nuclear localization signals
pat4: KRPR (4) at 2
pat4: RRRR (5) at 21
pat4: RRRK (5) at 22
pat4: RRKR (5) at 23
pat7: none
bipartite: none
content of basic residues: 13.5%
NLS Score: 0.72
NNCN: Reinhardt's method for Cytoplasmic/Nuclear discrimination
Prediction: cytoplasmic
Reliability: 70.6
Final Results (k = 9/23):
26.1%: nuclear
21.7%: cytoplasmic
17.4%: mitochondrial
13.0%: Golgi
  8.7%: peroxisomal
  8.7%: endoplasmic reticulum
  4.3%: vesicles of secretory system
>> prediction for CG185793-02 is nuc (k = 23)
```

[0308] A search of the NOV3a protein against the Geneseq database, a proprietary database that contains sequences published in patents and patent publication, yielded several homologous proteins shown in Table 3C.

TABLE 3C
Geneseq Results for NOV3a

| | | NOV3a | Identities/ | |
|---|---|---|---|---|
| | | Residues/ | Similarities for | |
| Geneseq | Protein/Organism/Length [Patent #, | Match | the Matched | Expect |
| Identifier | Date] | Residues | Region | Value |
| AAB84617 | Amino acid sequence of matrix | 1 . . . 557 | 477/572 (83%) | 0.0 |
| | metalloproteinase-15 - Homo | 106 . . . 669 | 487/572 (84%) | |
| | sapiens, 669 aa. | | | |
| | [WO200149309-A2, 12 JUL. 2001] | | | |
| AAE10424 | Human matrix | 1 . . . 557 | 477/572 (83%) | 0.0 |
| | metalloprotinase-15 (MMP-15) | 106 . . . 669 | 487/572 (84%) | |
| | protein - Homo sapiens, 669 | | | |
| | aa. [WO200166766-A2, | | | |
| | 13 SEP. 2001] | | | |
| AAR86408 | Human matrix metalloprotease | 1 . . . 557 | 477/572 (83%) | 0.0 |
| | MMPm2 - Homo sapiens, 669 aa. | 106 . . . 669 | 487/572 (84%) | |
| | [WO9525171-A2, 21 SEP. 1995] | | | |
| AAW71851 | Mouse membrane type 2 matrix | 1 . . . 557 | 421/568 (74%) | 0.0 |
| | metalloproteinase - Mus sp, | 102 . . . 657 | 456/568 (80%) | |
| | 657 aa. [JP10210982-A, | | | |
| | 11 AUG. 1998] | | | |
| ABP41430 | Human ovarian antigen HLHCB31, | 372 . . . 557 | 182/186 (97%) | e−108 |
| | SEQ ID NO: 2562 - Homo sapiens, | 1 . . . 186 | 182/186 (97%) | |
| | 186 aa. [WO200200677-A1, | | | |
| | 03 JAN. 2002] | | | |

[0309] In a BLAST search of public sequence databases, the NOV3a protein was found to have homology to the proteins shown in the BLASTP data in Table 3D.

TABLE 3D
Public BLASTP Results for NOV3a

| | | NOV3a | Identities/ | |
|---|---|---|---|---|
| Protein | | Residues/ | Similarities for | |
| Accession | | Match | the Matched | Expect |
| Number | Protein/Organism/Length | Residues | Portion | Value |
| P51511 | Matrix metalloproteinase-15 precursor (EC | 1 . . . 557 | 477/572 (83%) | 0.0 |
| | 3.4.24.-) (MMP-15) (Membrane-type matrix | 106 . . . 669 | 487/572 (84%) | |
| | metalloproteinase 2) (MT-MMP 2) | | | |
| | (MTMMP2) (Membrane-type-2 matrix | | | |
| | metalloproteinase) (MT2-MMP) (MT2MMP) | | | |
| | (SMCP- 2) - Homo sapiens (Human), 669 | | | |
| | aa. | | | |
| AAP36651 | Homo sapiens matrix metalloproteinase 15 | 1 . . . 557 | 476/572 (83%) | 0.0 |
| | (membrane-inserted) - synthetic construct, | 1 . . . 564 | 486/572 (84%) | |
| | 565 aa (fragment). | | | |
| Q9BR96 | Matrix metalloproteinase 15 | 1 . . . 557 | 476/572 (83%) | 0.0 |
| | (Membrane-inserted) - Homo sapiens | 1 . . . 564 | 486/572 (84%) | |
| | (Human), 564 aa. | | | |
| O54732 | Matrix metalloproteinase-15 precursor (EC | 1 . . . 557 | 421/568 (74%) | 0.0 |
| | 3.4.24.-) (MMP-15) (Membrane-type matrix | 102 . . . 657 | 456/568 (80%) | |
| | metalloproteinase 2) (MT-MMP 2) | | | |
| | (MTMMP2) (Membrane-type-2 matrix | | | |
| | metalloproteinase) (MT2-MMP) (MT2MMP) - | | | |
| | Mus musculus (Mouse), 657 aa. | | | |
| CAD23883 | Sequence 3 from Patent WO0208280 - | 229 . . . 557 | 169/338 (50%) | 2e−93 |
| | Homo sapiens (Human), 582 aa. | 284 . . . 582 | 220/338 (65%) | |

[0310] PFam analysis predicts that the NOV3a protein contains the domains shown in the Table 3E.

TABLE 3E
Domain Analysis of NOV3a

| | | Identities/ | |
|---|---|---|---|
| | NOV3a Match | Similarities | |
| | Region Amino | for the | Expect |
| Pfam Domain | Acid Residues: | Matched Region | Value |
| Peptidase_M10 | 28 . . . 116 | 28/115 (24%) | 0.00094 |
| | | 59/115 (51%) | |
| hemopexin | 262 . . . 305 | 16/50 (32%) | 8.4e−14 |
| | | 36/50 (72%) | |
| hemopexin | 307 . . . 351 | 20/50 (40%) | 7.6e−14 |
| | | 36/50 (72%) | |
| hemopexin | 354 . . . 400 | 25/50 (50%) | 1e−17 |
| | | 41/50 (82%) | |
| hemopexin | 402 . . . 447 | 23/50 (46%) | 1.5e−13 |
| | | 38/50 (76%) | |

### Example 4

### NOV4, CG186317, ADAM22-like

[0311] The present invention encompasses NOV4, a novel protein bearing sequence similarity to ADAM22, nucleic acids that encode this protein or fragments thereof, and antibodies that bind immunospecifically to NOV4.

[0312] ADAM (a disintegrin and metalloproteinase) and MDC (metalloproteinase-like, disintegrin-like, and cysteine-rich) proteins, are a class of cell adhesion molecules. NOV 4 XX is a novel splice form of ADAM22 with 17 amino acids (residues 787V to 817E) different from ADAM 22. The ADAM22 gene has been mapped to chromosome 2q33 (Gene 237: 61-70, 1999). The NOV4 clone was analyzed, and the nucleotide and encoded polypeptide sequences are shown in Table 4A.

TABLE 4A
NOV4 Sequence Analysis

| | | |
|---|---|---|
| NOV4a, CG186317-02 | SEQ ID NO: 45 | 3079 bp |
| DNA Sequence | ORF Start: ATG at 53 | ORF Stop: TGA at 2549 |

TAGCCCGGCGCTCTCGCCGGCCACACGGAGCGGCGCCCGGGAGCTATGAGCCATGAAGCCGCCCGGCAGCAGC
TCGCGGCAGCCGCCCCTGGCGGGCTGCAGCCTTGCCGGCGCTTCCTGCGGCCCCCAACGCGGCCCCGCCGGCT
CGGTGCCTGCCAGCGCCCCGGCCCGCACGCCGCCCTGCCGCCTGCTTCTCGTCCTTCTCCTGCTGCCTCCGCT
CGCCGCCTCGTCCCGGCCCCGCGCCTGGGGGGCTGCTGCGCCCAGCGCTCCGCATTGGAATGAAACTGCAGAA
AAAAATTTGGGAGTCCTGGCAGATGAAGACAATACATTGCAACAGAATAGCAGCAGTAATATCAGTTACAGCA
ATGCAATGCAGAAAGAAATCACACTGCCTTCAAGACTCATATATTACATCAACCAAGACTCGGAAAGCCCTTA
TCACGTTCTTGACACAAAGGCAAGACACCAGCAAAAACATAATAAGGCTGTCCATCTGGCCCAGGCAAGCTTC
CAGATTGAAGCCTTCGGCTCCAAATTCATTCTTGACCTCATACTGAACAATGGTTTGTTGTCTTCTGATTATG
TGGAGATTCACTACGAAAATGGGAAACCACAGTACTCTAAGGGTGGAGAGCACTGTTACTACCATGGAAGCAT
CAGAGGCGTCAAAGACTCCAAGGTGGCTCTGTCAACCTGCAATGGACTTCATGGCATGTTTGAAGATGATACC
TTCGTGTATATGATAGAGCCACTAGAGCTGGTTCATGATGAGAAAAGCACAGGTCGACCACATATAATCCAGA
AAACCTTGGCAGGACAGTATTCTAAGCAAATGAAGAATCTCACTATGGAAAGAGGTGACCAGTGGCCCTTTCT
CTCTGAATTACAGTGGTTGAAAAGAAGGAAGAGAGCAGTGAATCCATCACGTGGTATATTTGAAGAAATGAAA
TATTTGGAACTTATGATTGTTAATGATCACAAAACGTATAAGAAGCATCGCTCTTCTCATGCACATACCAACA
ACTTTGCAAAGTCCGTGGTCAACCTTGTGGATTCTATTTACAAGGAGCAGCTCAACACCAGGGTTGTCCTGGT
GGCTGTAGAGACCTGGACTGAGAAGGATCAGATTGACATCACCACCAACCCTGTGCAGATGCTCCATGAGTTC
TCAAAATACCGGCAGCGCATTAAGCAGCATGCTGATGCTGTGCACCTCATCTCGCGGGTGACATTTCACTATA
AGAGAAGCAGTCTGAGTTACTTTGGAGGTGTCTGTTCTCGCACAAGAGGAGTTGGTGTGAATGAGTATGGTCT
TCCAATGGCAGTGGCACAAGTATTATCGCAGAGCCTGGCTCAAAACCTTGGAATCCAATGGGAACCTTCTAGC
AGAAAGCCAAAATGTGACTGCACAGAATCCTGGGGTGGCTGCATCATGGAGGAAACAGGGGTGTCCCATTCTC
GAAAATTTTCAAAGTGCAGCATTTTGGAGTATAGAGACTTTTTACAGAGAGGAGGTGGAGCCTGCCTTTTCAA
CAGGCCAACAAAGCTATTTGAGCCCACGGAATGTGGAAATGGATACGTGGAAGCTGGGGAGGAGTGTGATTGT
GGTTTTCATGTGGAATGCTATGGATTATGCTGTAAGAAATGTTCCCTCTCCAACGGGGCTCACTGCAGCGACG
GGCCCTGCTGTAACAATACCTCATGTCTTTTTCAGCCACGAGGGTATGAATGCCGGGATGCTGTGAACGAGTG
TGATATTACTGAATATTGTACTGGAGACTCTGGTCAGTGCCCACCAAATCTTCATAAGCAAGACGGATATGCA
TGCAATCAAAATCAGGGCCGCTGCTACAATGGCGAGTGCAAGACCAGAGACAACCAGTGTCAGTACATCTGGG
GAACAAAGGCTGCAGGGTCTGACAAGTTCTGCTATGAAAAGCTGAATACAGAAGGCACTGAGAAGGGAAACTG
CGGGAAGGATGGAGACCGGTGGATTCAGTGCAGCAAACATGATGTGTTCTGTGGATTCTTACTCTGTACCAAT
CTTACTCGAGCTCCACGTATTGGTCAACTTCAGGGTGAGATCATTCCAACTTCCTTCTACCATCAAGGCCGGG
TGATTGACTGCAGTGGTGCCCATGTAGTTTTAGATGATGATACGGATGTGGGCTATGTAGAAGATGGAACGCC
ATGTGGCCCGTCTATGATGTGTTTAGATCGGAAGTGCCTACAAATTCAAGCCCTAAATATGAGCAGCTGTCCA
CTCGATTCCAAGGGTAAAGTCTGTTCGGGCCATGGGGTGTGTAGTAATGAAGCCACCTGCATTTGTGATTTCA
CCTGGGCAGGGACAGATTGCAGTATCCGGGATCCAGTTAGGAACCTTCACCCCCCCAAGGATGAAGGACCCAA
GGTGAATATGGCCACAAGCAGGCTAATAGGGGCCGTGGCCGGCACCATTCTGGCCCTGGGGGTGATTTTTGGA
GGCACAGGGTGGGGAATAGAAATGTCAAGAAGAGAAGGTTCGATCCTACTCAGCAAGGCCCCATCTGAAATCA
GCTGCGCTGGATGGACACCGCCTTGCACTGTTGGATTCTGGGTATGACATACTCGCAGCAGTGTTACTGGAAC
TATTAAGTTTGTAAACAAAACCTTTGGGTGGTAATGACTACGGAGCTAAAGTTGGGGTGACAAGGATGGGGTA
AAAGAAAACTGTCTCTTTTGGAAATAATGTCAAAGAACACCTTTCACCACCTGTCAGTAAACGGGGGAGGGGG
CAAAAGACCATGCTATAAAAAGAACTGTTCCAGAATCTTTTTTTTCCCTAATGGACGAAGGAACAACACACAC
ACAAAAATTAAATGCAATAAAGGAATCATTAAAAAAAATAGTAAATGATTTTTTTTCCCTCAGCCTGCTGGCA
CTTAATATCTTCTAAATGATTTGGCATGATTTTTTTTTCTTTACTACCGATGACAAACTCCAGTGGCATGAAG
ATCTAATTTTCAAAAGGGTAAAAACTGCATGGCATATATACAACAAGCTAGCAAGCCAATTCTCAGCAAAACC
TGCAACAGAATTC

| | | | |
|---|---|---|---|
| NOV4a, CG186317-02 | | | |
| Protein Sequence | SEQ ID NO: 46 | 832 aa | MW at 92045.3kD |

MKPPGSSSRQPPLAGCSLAGASCGPQRGPAGSVPASAPARTPPCRLLLVLLLLPPLAASSRPRAWGAAAPSAP
HWNETAEKNLGVLADEDNTLQQNSSSNISYSNAMQKEITLPSRLIYYINQDSESPYHVLDTKARHQQKHNKAV
HLAQASFQTEAFGSKFILDLILNNGLLSSDYVEIHYENGKPQYSKGGEHCYYHGSIRGVKDSKVALSTCNGLH
GMFEDDTFVYMIEPLELVHDEKSTGRPHIIQKTLAGQYSKQMKNLTMERGDQWPFLSELQWLKRRKRAVNPSR
GIFEEMKYLELMIVNDHKTYKKHRSSHAHTNNFAKSVVNLVDSIYKEQLNTRVVLVAVETWTEKDQIDITTNP
VQMLHEFSKYRQRIKQHADAVHLISRVTFHYKRSSLSYFGGVCSRTRGVGVNEYGLPMAVAQVLSQSLAQNLG
IQWEPSSRKPKCDCTESWGGCIMEETGVSHSRKFSKCSILEYRDFLQRGGGACLFNRPTKLFEPTECGNGYVE
AGEECDCGFHVECYGLCCKKCSLSNGAHCSDGPCCNNTSCLFQPRGYECRDAVNECDITEYCTGDSGQCPPNL
HKQDGYACNQNQGRCYNGECKTRDNQCQYIWGTKAAGSDKFCYEKLNTEGTEKGNCGKDGDRWIQCSKMDVFC
GFLLCTNLTRAPRIGQLQGEIIPTSFYHQGRVIDCSGAHVVLDDDTDVGYVEDGTPCGPSMMCLDRKCLQIQA
LNMSSCPLDSKGKVCSGHGVCSNEATCICDFTWAGTDCSIRDPVRNLHPPKDEGPKVNMATSRLIGAVAGTIL
ALGVIFGGTGWGIENVKKRRFDPTQQGPI

[0313] Further analysis of the NOV4a protein yielded the following properties shown in Table 4B.

TABLE 4B
Protein Sequence Properties NOV4a

| SignalP | Cleavage site between residues 60 and 61 | | | |
|---|---|---|---|---|
| analysis: | | | | |
| PSORT II | PSG: a new signal peptide prediction method | | | |
| analysis: | N-region: length 9; pos. chg 2; neg. chg 0 | | | |
| | H-region: length 17; peak value 7.01 | | | |
| | PSG score: 2.61 | | | |
| | GvH: von Heijne's method for signal seq. recognition | | | |
| | GvH score (threshold: −2.1): 6.69 | | | |
| | possible cleavage site: between 58 and 59 | | | |
| | >>> Seems to have a cleavable signal peptide (1 to 58) | | | |
| | ALOM: Klein et al's method for TM region allocation | | | |
| | Init position for calculation: 59 | | | |
| | Tentative number of TMS(s) for the threshold 0.5: 1 | | | |
| | Number of TMS(s) for threshold 0.5: 1 | | | |
| | INTEGRAL | Likelihood = | −6.53 | Transmembrane 794-810 |
| | PERIPHERAL | Likelihood = | 3.98 (at 157) | |
| | ALOM score: −6.53 (number of TMSs: 1) | | | |
| | MTOP: Prediction of membrane topology (Hartmann et al.) | | | |
| | Center position for calculation: 29 | | | |
| | Charge difference: 1.0 C(2.0)-N(1.0) | | | |
| | C > N: C-terminal side will be inside | | | |
| | >>>Caution: Inconsistent mtop result with signal peptide | | | |
| | >>> membrane topology: type 1a (cytoplasmic tail 811 to 832) | | | |
| | MITDISC: discrimination of mitochondrial targeting seq | | | |
| | R content: | 6 | Hyd Moment(75): | 4.52 |
| | Hyd Moment(95): | 5.09 | G content: | 7 |
| | D/E content: | 1 | S/T content: | 11 |

Score: 0.13
Gavel: prediction of cleavage sites for mitochondrial preseq
R-2 motif at 73 PRA|WG
NUCDISC: discrimination of nuclear localization signals
pat4: KRRK (5) at 282
pat4: RRKR (5) at 283
pat4: KKHR (3) at 313
pat4: RKPK (4) at 446
pat4: KKRR (5) at 820
pat7: PSSRKPK (3) at 443
bipartite: none
content of basic residues: 10.9%
NLS Score: 1.16
NNCN: Reinhardt's method for Cytoplasmic/Nuclear discrimination
Prediction: nuclear
Reliability: 76.7
Final Results (k = 9/23):
44.4%: extracellular, including cell wall
22.2%: endoplasmic reticulum
22.2%: Golgi
11.1%: plasma membrane
>> prediction for CG186317-02 is exc (k = 9)

[0314] A search of the NOV4a protein against the Geneseq database, a proprietary database that contains sequences published in patents and patent publication, yielded several homologous proteins shown in Table 4C.

TABLE 4C
Geneseq Results for NOV4a

| | | NOV4a | Identities/ | |
|---|---|---|---|---|
| | | Residues/ | Similarities for | |
| Geneseq | Protein/Organism/Length [Patent #, | Match | the Matched | Expect |
| Identifier | Date] | Residues | Region | Value |
| AAE36169 | Human MDC3 protein - Homo sapiens, | 1 . . . 832 | 815/832 (97%) | 0.0 |
| | 832 aa. [WO2002100898-A2, | 1 . . . 832 | 822/832 (97%) | |
| | 19 DEC. 2002] | | | |
| ABU56563 | Lung cancer-associated polypeptide | 1 . . . 832 | 815/832 (97%) | 0.0 |
| | #156 - Unidentified, 832 aa. | 1 . . . 832 | 822/832 (97%) | |
| | [WO200286443-A2, 31 OCT. 2002] | | | |
| ABU56479 | Lung cancer-associated polypeptide | 1 . . . 832 | 815/832 (97%) | 0.0 |
| | #72 - Unidentified, 832 aa. | 1 . . . 832 | 822/832 (97%) | |
| | [WO200286443-A2, 31 OCT. 2002] | | | |
| AAB47778 | ADAM 23 - Homo sapiens, 832 aa. | 1 . . . 832 | 815/832 (97%) | 0.0 |
| | [WO200174857-A2, 11 OCT. 2001] | 1 . . . 832 | 822/832 (97%) | |
| AAY25120 | Human MDC3 protein - Homo sapiens, | 1 . . . 832 | 815/832 (97%) | 0.0 |
| | 832 aa. [JP11155574-A, 15 JUN. 1999] | 1 . . . 832 | 822/832 (97%) | |

[0315] In a BLAST search of public sequence databases, the NOV4a protein was found to have homology to the proteins shown in the BLASTP data in Table 4D.

TABLE 4D
Public BLASTP Results for NOV4a

| | | NOV4a | Identities/ | |
|---|---|---|---|---|
| Protein | | Residues/ | Similarities for | |
| Accession | | Match | the Matched | Expect |
| Number | Protein/Organism/Length | Residues | Portion | Value |
| O75077 | MDC3 (ADAM22 protein) - Homo sapiens | 1 . . . 832 | 815/832 (97%) | 0.0 |
| | (Human), 832 aa. | 1 . . . 832 | 822/832 (97%) | |
| Q9R1V7 | ADAM23 - Mus musculus (Mouse), 829 aa. | 1 . . . 832 | 764/833 (91%) | 0.0 |
| | | 1 . . . 829 | 787/833 (93%) | |
| Q8CC33 | A disintegrin and metalloprotease domain | 1 . . . 692 | 637/693 (91%) | 0.0 |
| | 23 - Mus musculus (Mouse), 690 aa. | 1 . . . 689 | 653/693 (93%) | |
| AAH54536 | Adam11 protein - Mus musculus (Mouse), | 47 . . . 832 | 393/804 (48%) | 0.0 |
| | 778 aa. | 9 . . . 778 | 495/804 (60%) | |
| Q9P0K1 | ADAM 22 precursor (A disintegrin and | 107 . . . 823 | 367/742 (49%) | 0.0 |
| | metalloproteinase domain 22) | 45 . . . 767 | 485/742 (64%) | |
| | (Metalloproteinase-like, disintegrin-like, and | | | |
| | cysteine-rich protein 2) | | | |
| | (Metalloproteinase-disintegrin ADAM22-3) - | | | |
| | Homo sapiens (Human), 906 aa. | | | |

[0316] PFam analysis predicts that the NOV4a protein contains the domains shown in the Table 4E.

TABLE 4E
Domain Analysis of NOV4a

| | | Identities/ | |
|---|---|---|---|
| | NOV4a Match Region | Similarities | |
| Pfam Domain | Amino Acid Residues: | for the Matched Region | Expect Value |
| Pep_M12B_propep | 165 . . . 278 | 34/124 (27%) | 4.5e−20 |
| | | 84/124 (68%) | |
| Reprolysin | 299 . . . 496 | 70/205 (34%) | 1.4e−90 |
| | | 181/205 (88%) | |
| disintegrin | 511 . . . 586 | 41/79 (52%) | 1.9e−29 |
| | | 62/79 (78%) | |
| EB | 714 . . . 768 | 14/63 (22%) | 0.85 |
| | | 36/63 (57%) | |
| EGF | 736 . . . 768 | 11/48 (23%) | 0.31 |
| | | 23/48 (48%) | |

### Example 5

### NOV5, CG192920

[0317] The NOV5 family of novel nucleic acids and polypeptides clones includes NOV5a through NOV5c, SEQ ID NOs: 45-50 and 188, and the nucleotide and encoded polypeptide sequences are shown in Table 5A. In a particular embodiment NOV5 polypeptide is SEQ ID NO:188, wherein residue XI is present or absent and when present is RLRKPKITWSLRHSEDGICRISLTCSVED GGNTVMYTWTPLQKEAVVSQGESHLNVSWRSSENHPNLTCTASNPVSRSSHQFLSEN ICSG (corresponding to amino acid residues 319-408 of SEQ ID NO:48); X₂ is residue S or G; X₃ is residue E or K; X₄ is present or absent and when present is residue V.

[0318] Equivalent nucleic acid and polypeptide substitutions apply to other NOV5 sequences as would be appreciated by one of skill in the art, and are encompassed in the present invention.

TABLE 5A
NOV5 Sequence Analysis

| | | |
|---|---|---|
| NOV5a, CG192920-02 | SEQ ID NO: 47 | 1848 bp |
| DNA Sequence | ORF Start: ATG at 1 | ORF Stop: TAG at 1846 |

ATGGGACTAAGAGCCTCTGGAAAGGACTCAGCCCCAACAGTGGTGTCAGGGATCCTAGGGGGTTCCGTGACTC
TCCCCCTAAACATCTCAGTAGACACAGAGATTGAGAACGTCATCTGGATTGGTCCCAAAAATGCTCTTGCTTT
CGCACGTCCCAAAGAAAATGTAACCATTATGGTCAAAAGCTACCTGGGCCGACTAGACATCACCAAGTGGAGT
TACTCCCTGTGCATCAGCAATCTGACTCTGAATGATGCAGGATCCTACAAAGCCCAGATAAACCAAAGGAATT
TTGAAGTCACCACTGAGGAGGAATTCACCCTGTTCGTCTATGAGCAGCTGCAGGAGCCCCAAGTCACCATGAA
GTCTGTGAAGGTGTCTGAGAACTTCTCCTGTAACATCACTCTAATGTGCTCCGTGAAGGGGGCAGAGAAAAGT
GTTCTGTACAGCTGGACCCCAAGGGAACCCCATGCTTCTGAGTCCAATGGAGGCTCCATTCTTACCGTCTCCC
GAACACCATGTGACCCAGACCTGCCATACATCTGCACAGCCCAGAACCCCGTCAGCCAGAGAAGCTCCCTCCC
TGTCCATGTTGGGCAGTTCTGTACAGATCCAGGAGCCTCCAGAGGAGGAACAACGGGGGAGACTGTGGTAGGG
GTCCTGGGAGAGCCAGTCACCCTGCCACTTGCACTCCCAGCCTGCCGGGACACAGAGAAGGTTGTCTGGTTGT
TTAACACATCCATCATTAGCAAAGAGAGGGAAGAAGCAGCAACGGCAGATCCACTCATTAAATCCAGGGATCC
TTACAAGAACAGGGTGTGGGTCTCCAGCCAGGACTGCTCCCTGAAGATCAGCCAGCTGAAGATAGAGGACGCC
GGCCCCTACCATGCCTACGTGTGCTCAGAGGCCTCCAGCGTCACCAGCATGACACATGTCACCCTGCTCATCT
ACCGCAGGCTGAGGAAGCCCAAAATCACGTGGAGCCTCAGGCACAGTGAGGATGGCATCTGCAGGATCAGCCT
GACCTGCTCCGTGGAGGACGGGGGAAACACTGTCATGTACACATGGACCCCGCTGCAGAAGGAAGCTGTTGTG
TCCCAAGGGGAATCACACCTCAATGTCTCATGGAGAAGCAGTGAAAATCACCCCAACCTCACATGCACAGCCA
GCAACCCTGTCAGCAGGAGTTCCCACCAGTTTCTTTCTGAGAACATCTGTTCAGGACCTGAGAGAAACACAAA
GCTTTGGATTGGGTTGTTCCTGATGGTTTGCCTTCTGTGCGTTGGGATCTTCAGCTGGTGCATTTGGAAGCGA
AAAGGACGGTGTTCAGTCCCAGCCTTCTGTTCCAGCCAAGCTGAGGCCCCAGCGGATACACCAGAACCCACAG
CTGGCCACACGCTATACTCTGTGCTCTCCCAAGGATATGAGAAGCTGGACACTCCCCTCAGGCCTGCCAGGCA
ACAGCCTACACCCACCTCAGACGGCAGCTCTGACAGCAACCTCACAACTGAGGAGGATGAGGACAGGCCTGAG
GTGCACAAGCCCATCAGTGGAAGATATGAGGTATTTGACCAGGTCACCCAGGAGGGCGCTGGACATGACCCAG
CCCCTGAGGGCCAAGCAGACTATGATCCCGTCACTCCATATGTCACGGAAGTTGAGTCTGTGGTTGGAGAGAA
CACCATGTATGCACAAGTGTTCAACTTACAGGGAAAGACCCCAGTTTCTCAGAAGGAAGAGAGCTCAGCCACA
ATCTACTGCTCCATACGGAAACCTCAGGTGGTGCCACCACCACAACAGAATGATCTTGAGATTCCTGAAAGTC
CTACCTATGAAAATTTCACCTAG

| | | | |
|---|---|---|---|
| NOV5a,CG192920-02 | | | |
| Protein Sequence | SEQ ID NO: 48 | 615 aa | MW at 67667.4kD |

MGLRASGKDSAPTVVSGILGGSVTLPLNISVDTEIENVIWIGPKMALAFARPKENVTIMVKSYLGRLDITKWS
YSLCISNLTLNDAGSYKAQINQRNFEVTTEEEFTLFVYEQLQEPQVTMKSVKVSENFSCNITLMCSVKGAEKS
VLYSWTPREPHASESNGGSILTVSRTPCDPDLPYICTAQNPVSQRSSLPVHVGQFCTDPGASRGGTTGETVVG
VLGEPVTLPLALPACRDTEKVVWLFNTSIISKEREEAATADPLIKSRDPYKNRVWVSSQDCSLKISQLKIEDA
GPYHAYVCSEASSVTSMTHVTLLIYRRLRKPKITWSLRHSEDGICRISLTCSVEDGGNTVMYTWTPLQKEAVV
SQGESHLNVSWRSSENHPNLTCTASNPVSRSSHQFLSENICSGPERNTKLWIGLFLMVCLLCVGIFSWCIWKR
KGRCSVPAFCSSQAEAPADTPEPTAGHTLYSVLSQGYEKLDTPLRPARQQPTPTSDGSSDSNLTTEEDEDRPE
VHKPISGRYEVFDQVTQEGAGHDPAPEGQADYDPVTPYVTEVESVVGENTMYAQVFNLQGKTPVSQKEESSAT
TYCSIRKPQVVPPPQQNDLEIPESPTYENFT

| | | |
|---|---|---|
| NOV5b, 314409072 | SEQ ID NO: 49 | 1581 bp |
| DNA Sequence | ORF Start: at 1 | ORF Stop: TAG at 1579 |

ATGGGACTAAGAGCCTCTGGAAAGGACTCAGCCCCAACAGTGGTGTCAGGGATCCTAGGGGGTTCCGTGACTC
TCCCCCTAAACATCTCAGTAGACACAGAGATTGAGAACGTCATCTGGATTGGTCCCAAAAATGCTCTTGCTTT
CGCACGTCCCAAAGAAAATGTAACCATTATGGTCAAAAGCTACCTGGGCCGACTAGACATCACCAAGTGGAGT
TACTCCCTGTGCATCAGCAATCTGACTCTGAATGATGCAGGATCCTACAAAGCCCAGATAAACCAAAGGAATT
TTGAAGTCACCACTGAGGAGGAATTCACCCTGTTCGTCTATGAGCAGCTGCAGGAGCCCCAAGTCACCATGAA
GTCTGTGAAGGTGTCTGAGAACTTCTCCTGTAACATCACTCTAATGTGCTCCGTGAAGGGGGCAGAGAAAAGT
GTTCTGTACAGCTGGACCCCAAGGGAACCCCATGCTTCTGAGTCCAATGGAGGCTCCATTCTTACCGTCTCCC
GAACACCATGTGACCCAGACCTGCCATACATCTGCACAGCCCAGAACCCCGTCAGCCAGAGAAGCTCCCTCCC
TGTCCATGTTGGGCAGTTCTGTACAGATCCAGGAGCCTCCAGAGGAGGAACAACGGGGGAGACTGTGGTAGGG
GTCCTGGGAGAGCCAGTCACCCTGCCACTTGCACTCCCAGCCTGCCGGGACACAGAGAAGGTTGTCTGGTTGT
TTAACACATCCATCATTAGCAAAGAGAGGGAAGAAGCAGCAACGGCAGATCCACTCATTAAATCCAGGGATCC
TTACAAGAACAGGGTGTGGGTCTCCAGCCAGGACTGCTCCCTGAAGATCAGCCAGCTGAAGATAGAGGACGCC
GGCCCCTACCATGCCTACGTGTGCTCAGAGGCCTCCAGCGTCACCAGCATGACACATGTCACCCTGCTCATCT
ACCGACCTGAGAGAAACACAAAGCTTTGGATTGGGTTGTTCCTGATGGTTTGCCTTCTGTGCGTTGGGATCTT
CAGCTGGTGCATTTGGAAGCGAAAAGGACGGTGTTCAGTCCCAGCCTTCTGTTCCAGCCAAGCTGAGGCCCCA
GCGGATACACCAGAACCCACAGCTGGCCACACGCTATACTCTGTGCTCTCCCAAGGATATGAGAAGCTGGACA
CTCCCCTCAGGCCTGCCAGGCAACAGCCTACACCCACCTCAGACAGCAGCTCTGACAGCAACCTCACAACTGA
GGAGGATGAGGACAGGCCTGAGGTGCACAAGCCCATCAGTGGAAGATATGAGGTATTTGACCAGGTCACTCAG
GAGGGCGCTGGACATGACCCAGCCCCTGAGGGCCAAGCAGACTATGATCCCGTCACTCCATATGTCACGGAAG
TTGAGTCTGTGGTTGGAGAGAACACCATGTATGCACAAGTGTTCAACTTACAGGGAAAGACCCCAGTTTCTCA
GGAGGAAGAGAGCTCAGCCACAATCTACTGCTCCATACGGAAACCTCAGGTGGTGGTGCCACCACCACAACAG
AATGATCTTGAGATTCCTGAAAGTCCTACCTATGAAAATTTCACCTAG

| | | | |
|---|---|---|---|
| NOV5b, 314409072 | | | |
| Protein Sequence | SEQ ID NO: 50 | 526 aa | MW at 58839.6kD |

MGLRASGKDSAPTVVSGILGGSVTLPLNISVDTEIENVIWIGPKNALAFARPKENVTIMVKSYLGRLDITKWS
YSLCISNLTLNDAGSYKAQINQRNFEVTTEEEFTLFVYEQLQEPQVTMKSVKVSENFSCNITLMCSVKGAEKS
VLYSWTPREPHASESNGGSILTVSRTPCDPDLPYICTAQNPVSQRSSLPVHVGQFCTDPGASRGGTTGETVVG
VLGEPVTLPLALPACRDTEKVVWLFNTSIISKEREEAATADPLIKSRDPYKNRVWVSSQDCSLKISQLKIEDA
GPYHAYVCSEASSVTSMTHVTLLIYRPERNTKLWIGLFLMVCLLCVGIFSWCIWKRKGRCSVPAFCSSQAEAP
ADTPEPTAGHTLYSVLSQGYEKLDTPLRPARQQPTPTSDSSSDSNLTTEEDEDRPEVHKPISGRYEVFDQVTQ
EGAGHDPAPEGQADYDPVTPYVTEVESVVGENTMYAQVFNLQGKTPVSQEEESSATIYCSIRKPQVVVPPPQQ
NDLEIPESPTYENFT

| | | | |
|---|---|---|---|
| NOV5c, CG192920 | | | MW approx |
| Protein Sequence | SEQ ID NO: 188 | 615 aa | 67667.4kD |

MGLRASGKDSAPTVVSGILGGSVTLPLNISVDTEIENVIWIGPKNALAFARPKENVTIMVKSYLGRLDITKWS
YSLCISNLTLNDAGSYKAQINQRNFEVTTEEEFTLFVYEQLQEPQVTMKSVKVSENFSCNITLMCSVKGAEKS
VLYSWTPREPHASESNGGSILTVSRTPCDPDLPYICTAQNPVSQRSSLPVHVGQFCTDPGASRGGTTGETVVG
VLGEPVTLPLALPACRDTEKVVWLFNTSIISKEREEAATADPLIKSRDPYKMRVWVSSQDCSLKISQLKIEDA
GPYHAYVCSEASSVTSMTHVTLLIYRX₁PERNTKLWIGLFLMVCLLCVGIFSWCIWKRKGRCSVPAFCSSQAE
APADTPEPTAGHTLYSVLSQGYEKLDTPLRPARQQPTPTSDX₂SSDSNLTTEEDEDRPEVHKPISGRYEVFDQ
VTQEGAGHDPAPEGQADYDPVTPYVTEVESVVGENTMYAQVFNLQGKTPVSQX₃EESSATIYCSIRKPQX₄VP
PPQQNDLEIPESPTYENFT
[Wherein X₁ is present or absent and when present is RLRKPKITWSLRHSEDGICR
ISLTCSVEDGGNTVMYTWTPLQKEAVVSQGESHLNVSWRSSENHPNLTCTASNPVSRSSHQFLSENICSG;
X₂ is residue S or G; X₃ is residue E or K; X₄ is present or absent and
when present is residue V.]

[0319] A ClustalW comparison of the above protein sequences yields the following sequence alignment shown in Table 5B.

[image]

[0320] Further analysis of the NOV5b protein yielded the following properties shown in Table5C.

TABLE 5C
Protein Sequence Properties NOV5b

| SignalP | No Known Signal Sequence Predicted | | | |
|---|---|---|---|---|
| analysis: | | | | |
| PSORT II | PSG: a new signal peptide prediction method | | | |
| analysis: | N-region: length 8; pos. chg 2; neg. chg 1 | | | |
| | H-region: length 4; peak value −0.38 | | | |
| | PSG score: −4.78 | | | |
| | GvH: von Heijne's method for signal seq. recognition | | | |
| | GvH score (threshold: −2.1): −5.83 | | | |
| | possible cleavage site: between 59 and 60 | | | |
| | >>> Seems to have no N-terminal signal peptide | | | |
| | ALOM: Klein et al's method for TM region allocation | | | |
| | Init position for calculation: 1 | | | |
| | Tentative number of TMS(s) for the threshold 0.5: 1 | | | |
| | Number of TMS(s) for threshold 0.5: 1 | | | |
| | INTEGRAL | Likelihood = | −10.77 | Transmembrane 334-350 |
| | PERIPHERAL | Likelihood = | 0.58 (at 226) | |
| | ALOM score: −10.77 (number of TMSs: 1) | | | |
| | MTOP: Prediction of membrane topology (Hartmann et al.) | | | |
| | Center position for calculation: 341 | | | |
| | Charge difference: 1.5 C(4.0)-N(2.5) | | | |
| | C > N: C-terminal side will be inside | | | |
| | >>> membrane topology: type 1b (cytoplasmic tail 334 to 535) | | | |
| | MITDISC: discrimination of mitochondrial targeting seq | | | |
| | R content: | 3 | Hyd Moment(75): | 6.34 |
| | Hyd Moment(95): | 7.87 | G content: | 3 |
| | D/E content: | 2 | S/T content: | 2 |

Score: −4.90
Gavel: prediction of cleavage sites for mitochondrial preseq
R-2 motif at 23 LRA|SG
NUCDISC: discrimination of nuclear localization signals
pat4: none
pat7: none
bipartite: none
content of basic residues: 8.6%
NLS Score: −0.47
Dileucine motif in the tail: found
LL at 344
NNCN: Reinhardt's method for Cytplasmic/Nuclear discrimination
Prediction: nuclear
Reliability: 70.6
Psort Results (see Details):
70.0%: plasma membrane
20.0%: endoplasmic reticulum (membrane)
10.0%: mitochondrial inner membrane
0.0%: endoplasmic reticulum (lumen)

[0321] A search of the NOV5b protein against the Geneseq database, a proprietary database that contains sequences published in patents and patent publication, yielded several homologous proteins shown in Table 5D.

TABLE 5D
Geneseq Results for NOV5b

| | | NOV5b | Identities/ | |
|---|---|---|---|---|
| | | Residues/ | Similarities for | |
| Geneseq | Protein/Organism/Length [Patent #, | Match | the Matched | Expect |
| Identifier | Date] | Residues | Region | Value |
| AAU74425 | Human protein sequence #3, related to | 1 . . . 601 | 321/327 (98%) | 4.8e−170 |
| | isolation of genes within SLE-1B - Homo | 10 . . . 610 | 322/327 (98%) | |
| | sapiens, 610 aa. [WO200188200-A2, | | | |
| | 22 NOV. 2001] | | | |
| ABG96270 | Human immunoglobulin superfamily | 1 . . . 525 | 510/526 (96%) | 9.7e−275 |
| | protein IGSFP-8 - Homo sapiens, 551 | 41 . . . 551 | 511/526 (97%) | |
| | aa. [WO200272794-A2, 19 SEP. 2002] | | | |
| AAU74424 | Mouse protein sequence #3, related to | 1 . . . 595 | 185/318 (58%) | 3.8e−138 |
| | isolation of genes within SLE-1B - Mus | 20 . . . 627 | 232/318 (72%) | |
| | musculus, 629 aa. [WO200188200-A2, | | | |
| | 22 NOV. 2001] | | | |

[0322] In a BLAST search of public sequence databases, the NOV5b protein was found to have homology to the proteins shown in the BLASTP data in Table 5E.

TABLE 5E
Public BLASTP Results for NOV5b

| | | NOV5b | Identities/ | |
|---|---|---|---|---|
| Protein | | Residues/ | Similarities for | |
| Accession | | Match | the Matched | Expect |
| Number | Protein/Organism/Length | Residues | Portion | Value |
| Q9HBG7 | T-lymphocyte surface antigen Ly-9 | 1 . . . 601 | 321/327 (98%) | 5.1e−170 |
| | precursor (Lymphocyte antigen 9) | 41 . . . 655 | 322/327 (98%) | |
| | (Cell-surface molecule Ly-9) (CD229 | | | |
| | antigen) - Homo sapiens (Human), 655 | | | |
| | aa. | | | |
| Q01965 | T-lymphocyte surface antigen Ly-9 | 1 . . . 601 | 186/318 (58%) | 1.7e−141 |
| | precursor (Lymphocyte antigen 9) | 41 . . . 654 | 233/318 (73%) | |
| | (Cell-surface molecule Ly-9) - Mus | | | |
| | musculus (Mouse), 654 aa. | | | |
| AAH55380 | Ly9 protein - Mus musculus (Mouse), | 1 . . . 601 | 186/318 (58%) | 2.1e−141 |
| | 649 aa (fragment). | 36 . . . 649 | 233/318 (73%) | |

[0323] PFam analysis predicts that the NOV5b protein contains the domains shown in the Table 5F. Specific amino acid residues of NOV5b for each domain is shown in column 2, equivalent domains in the other NOV5 proteins of the invention are also encompassed herein.

TABLE 5F
Domain Analysis of NOV5b

| | NOV5b Match Region | | |
|---|---|---|---|
| Pfam Domain | Amino Acid Residues: | Score | Expect Value |
| ig | 29 . . . 102 | 9.2 | 16 |
| ig | 140 . . . 193 | 12.5 | 7.2 |
| ig | 231 . . . 308 | 2.9 | 68 |

### Example 6

### NOV6, CG54470, FGF19-X

[0324] The NOV6 family of novel nucleic acids and polypeptides clones includes NOV6a through NOV6m, SEQ ID Nos: 51-76, and the nucleotide and encoded polypeptide sequences are shown in Table 6A. In a particular embodiment NOV6 nucleic acid sequence is SEQ ID NO:75, wherein each of residues X₁, X₅, X₇, is either A or G; X₂, X₃, X₄, X₆, X₈, is either C or T; and X₉, X₁₀ is either T or A. Nucleic acid sequence SEQ ID NO:75 encodes polypeptide SEQ ID NO:76, wherein residue Z₁ is T or A or I; Z₂ is V or A; Z₃ is L or P; Z₄ is Q or R; Z₅ is Q or STOP; Z₆ is R or G; Z₇ is L or P; Z₈ is L or Q; and Z₉ is L or Q. Equivalent nucleic acid and polypeptide substitutions apply to other NOV6 sequences as would be appreciated by one of skill in the art, and are emcompassed in the present invention.

TABLE 6A
NOV6 Sequence Analysis

| | | |
|---|---|---|
| NOV6a, CG54470-03 | SEQ ID NO: 51 | 375 bp |
| DNA Sequence | ORF Start: at 1 | ORF Stop: end of sequence |

CACCCCATCCCTGACTCCAGTCCTCTCCTGCAATTCGGGGGCCAAGTCCGGCAGCGGTACCTCTACACAGATG
ATGCCCAGCAGACAGAAGCCCACCTGGAGATCAGGGAGGATGGGACGGTGGGGGGCGCTGCTGACCAGAGCCC
CGAAAGTCTCCTGCAGCTGAAAGCCTTGAAGCCGGGAGTTATTCAAATCTTGGGAGTCAAGACATCCAGGTTC
CTGTGCCAGCGGCCAGATGGGGCCCTGTATGGATCGCTCCACTTTGACCCTGAGGCCTGCAGCTTCCGGGAGC
TGCTTCTTGAGGACGGATACAATGTTTACCAGTCCGAAGCCCACGGCCTCCCGCTGCACCTGCCAGGGTTACA
GAGGAGGCTC

| | | | |
|---|---|---|---|
| NOV6a, CG54470-03 | | | |
| Protein Sequence | SEQ ID NO: 52 | 125 aa | MW at 13865.5kD |

HPIPDSSPLLQFGGQVRQRYLYTDDAQQTEAHLEIREDGTVGGAADQSPESLLQLKALKPGVIQILGVKTSRF
LCQRPDGALYGSLHFDPEACSFRELLLEDGYNVYQSEAHGLPLHLPGLQRRL

| | | |
|---|---|---|
| NOV6b, 309326568 | SEQ ID NO: 53 | 549 bp |
| DNA Sequence | ORF Start: at 1 | ORF Stop: end of sequence |

CACCCCATCCCTGACTCCAGTCCTCTCCTGCAATTCGGGGGCCAAGTCCGGCAGCGGTACCTCTACACAGATG
ATGCCCAGCAGACAGAAGCCCACCTGGAGATCAGGGAGGATGGGACGGTGGGGGGCGCTGCTGACCAGAGCCC
CGAAAGTCTCCTGCAGCTGAAAGCCTTGAAGCCGGGAGTTATTCAAATCCTGGGAGTCAAGACATCCAGGTTC
CTGTGCCAGCGGCCAGATGGGGCCCTGTATGGATCGCTCCACTTTGACCCTGAGGCCTGCAGCTTCCGGGAGC
TGCTTCTTGAGGACGGATACAATGTTTACCAGTCCGAAGCCCACGGCCTCCCGCTGCACCTGCCAGGGAACAA
GTCCCCACACCGGGACCCTGCACCCCGAGGACCAGCTCGCTTCCTGCCACTACCAGGCCTGCCCCCCGCACTC
CCGGAGCCACCCGGAATCCTGGCCCCCCAGCCCCCCGATGTGGGCTCCTCGGACCCTCTGAGCATGGTGGGAT
TCCCAGGGCCGAAGCCCCAGCTACGCTTCCCTCGAGGG

| | | | |
|---|---|---|---|
| NOV6b, 309326568 | | | |
| Protein Sequence | SEQ ID NO: 54 | 183 aa | MW at 19771.4kD |

HPIPDSSPLLQFGGQVRQRYLYTDDAQQTEAHLEIREDGTVGGAADQSPESLLQLKALKPGVIQILGVKTSRF
LCQRPDGALYGSLHFDPEACSFRELLLEDGYNVYQSEAHGLPLHLPGNKSPHRDPAPRGPARFLPLPGLPPAL
PEPPGILAPQPPDVGSSDPLSMVGFPGPKPQLRFPRG

| | | |
|---|---|---|
| NOV6c, SNP 13374914 | SEQ ID NO: 55 | 643 bp |
| DNA Sequence | ORF Start: ATG at 9 | ORF Stop: TGA at 636 |

AGCCATTGATGGACTCGGACGAGACCGGGTTCGAGCACTCAGGACTGTGGGTTTCTGTGCTGGCTGGTCTTCT
GCTGGGAGCCTGCCAGGCACACCCCATCCCTGACTCCAGTCCTCTCCTGCAATTCGGGGGCCAAGTCCGGCAG
CGGTACCTCTACACAGATGATGCCCAGCAGACAGAAGCCCACCTGGAGATCAGGGAGGATGGGACGGTGGGGG
GCGCTGCTGACCAGAGCCCCGAAAGTCTCCTGCAGCTGAAAGCCTTGAAGCCGGGAGTTATTCAAATCTTGGG
AGTCAAGACATCCAGGTTCCTGTGCCAGCGGCCAGATGGGGCCCCGTATGGATCGCTCCACTTTGACCCTGAG
GCCTGCAGCTTCCGGGAGCTGCTTCTTGAGGACGGATACAATGTTTACCAGTCCGAAGCCCACGGCCTCCCGC
TGCACCTGCCAGGGAACAAGTCCCCACACCGGGACCCTGCACCCCGAGGACCAGCTCGCTTCCTGCCACTACC
AGGCCTGCCCCCCGCACTCCCGGAGCCACCCGGAATCCTGGCCCCCCAGCCCCCCGATGTGGGCTCCTCGGAC
CCTCTGAGCATGGTGGGACCTTCCCAGGGCCGAAGCCCCAGCTACGCTTCCTGAAGCCA

| | | | |
|---|---|---|---|
| NOV6c, SNP 13374914 | | | |
| Protein Sequence | SEQ ID NO: 56 | 209 aa | MW at 22283.8kD |

MDSDETGFEHSGLWVSVLAGLLLGACQAHPIPDSSPLLQFGGQVRQRYLYTDDAQQTEAHLEIREDGTVGGAA
DQSPESLLQLKALKPGVIQILGVKTSRFLCQRPDGAPYGSLHFDPEACSFRELLLEDGYNVYQSEAHGLPLHL
PGNKSPHRDPAPRGPARFLPLPGLPPALPEPPGILAPQPPDVGSSDPLSMVGPSQGRSPSYAS

| | | |
|---|---|---|
| NOV6d, SNP 13374915 | SEQ ID NO: 57 | 643 bp |
| DNA Sequence | ORF Start: ATG at 9 | ORF Stop: TGA at 636 |

AGCCATTGATGGACTCGGACGAGACCGGGTTCGAGCACTCAGGACTGTGGGTTTCTGTGCTGGCTGGTCTTCT
GCTGGGAGCCTGCCAGGCACACCCCATCCCTGACTCCAGTCCTCTCCTGCAATTCGGGGGCCAAGTCCGGCAG
CGGTACCTCTACACAGATGATGCCCAGCAGACAGAAGCCCACCTGGAGATCAGGGAGGATGGGACGGTGGGGG
GCGCTGCTGACCAGAGCCCCGAAAGTCTCCTGCAGCTGAAAGCCTTGAAGCCGGGAGTTATTCAAATCTTGGG
AGTCAAGACATCCGGGTTCCTGTGCCAGCGGCCAGATGGGGCCCTGTATGGATCGCTCCACTTTGACCCTGAG
GCCTGCAGCTTCCGGGAGCTGCTTCTTGAGGACGGATACAATGTTTACCAGTCCGAAGCCCACGGCCTCCCGC
TGCACCTGCCAGGGAACAAGTCCCCACACCGGGACCCTGCACCCCGAGGACCAGCTCGCTTCCTGCCACTACC
AGGCCTGCCCCCCGCACTCCCGGAGCCACCCGGAATCCTGGCCCCCCAGCCCCCCGATGTGGGCTCCTCGGAC
CCTCTGAGCATGGTGGGACCTTCCCAGGGCCGAAGCCCCAGCTACGCTTCCTGAAGCCA

| | | | |
|---|---|---|---|
| NOV6d, SNP 13374915 | | | |
| Protein Sequence | SEQ ID NO: 58 | 209 aa | MW at 22200.7kD |

MDSDETGFEHSGLWVSVLAGLLLGACQAHPIPDSSPLLQFGGQVRQRYLYTDDAQQTEAHLEIREDGTVGGAA
DQSPESLLQLKALKPGVIQILGVKTSGFLCQRPDGALYGSLHFDPEACSFRELLLEDGYNVYQSEAHGLPLHL
PGNKSPHRDPAPRGPARFLPLPGLPPALPEPPGILAPQPPDVGSSDPLSMVGPSQGRSPSYAS

| | | |
|---|---|---|
| NOV6e, SNP 13374916 | SEQ ID NO: 59 | 643 bp |
| DNA Sequence | ORF Start: ATG at 9 | ORF Stop: TAA at 282 |

AGCCATTGATGGACTCGGACGAGACCGGGTTCGAGCACTCAGGACTGTGGGTTTCTGTGCTGGCTGGTCTTCT
GCTGGGAGCCTGCCAGGCACACCCCATCCCTGACTCCAGTCCTCTCCTGCAATTCGGGGGCCAAGTCCGGCAG
CGGTACCTCTACACAGATGATGCCCAGCAGACAGAAGCCCACCTGGAGATCAGGGAGGATGGGACGGTGGGGG
GCGCTGCTGACCAGAGCCCCGAAAGTCTCCTGCAGCTGAAAGCCTTGAAGCCGGGAGTTATTTAAATCTTGGG
AGTCAAGACATCCAGGTTCCTGTGCCAGCGGCCAGATGGGGCCCTGTATGGATCGCTCCACTTTGACCCTGAG
GCCTGCAGCTTCCGGGAGCTGCTTCTTGAGGACGGATACAATGTTTACCAGTCCGAAGCCCACGGCCTCCCGC
TGCACCTGCCAGGGAACAAGTCCCCACACCGGGACCCTGCACCCCGAGGACCAGCTCGCTTCCTGCCACTACC
AGGCCTGCCCCCCGCACTCCCGGAGCCACCCGGAATCCTGGCCCCCCAGCCCCCCGATGTGGGCTCCTCGGAC
CCTCTGAGCATGGTGGGACCTTCCCAGGGCCGAAGCCCCAGCTACGCTTCCTGAAGCCA

| | | | |
|---|---|---|---|
| NOV6e, SNP 13374916 | | | |
| Protein Sequence | SEQ ID NO: 60 | 91 aa | MW at 9745.8kD |

MDSDETGFEHSGLWVSVLAGLLLGACQAHPIPDSSPLLQFGGQVRQRYLYTDDAQQTEAHLEIREDGTVGGAA
DQSPESLLQLKALKPGVI

| | | |
|---|---|---|
| NOV6f, SNP 13374917 | SEQ ID NO: 61 | 643 bp |
| DNA Sequence | ORF Start: ATG at 9 | ORF Stop: TGA at 636 |

AGCCATTGATGGACTCGGACGAGACCGGGTTCGAGCACTCAGGACTGTGGGTTTCTGTGCTGGCTGGTCTTCT
GCTGGGAGCCTGCCAGGCACACCCCATCCCTGACTCCAGTCCTCTCCTGCAATTCGGGGGCCAAGTCCGGCAG
CGGTACCTCTACACAGATGATGCCCGGCAGACAGAAGCCCACCTGGAGATCAGGGAGGATGGGACGGTGGGGG
GCGCTGCTGACCAGAGCCCCGAAAGTCTCCTGCAGCTGAAAGCCTTGAAGCCGGGAGTTATTCAAATCTTGGG
AGTCAAGACATCCAGGTTCCTGTGCCAGCGGCCAGATGGGGCCCTGTATGGATCGCTCCACTTTGACCCTGAG
GCCTGCAGCTTCCGGGAGCTGCTTCTTGAGGACGGATACAATGTTTACCAGTCCGAAGCCCACGGCCTCCCGC
TGCACCTGCCAGGGAACAAGTCCCCACACCGGGACCCTGCACCCCGAGGACCAGCTCGCTTCCTGCCACTACC
AGGCCTGCCCCCCGCACTCCCGGAGCCACCCGGAATCCTGGCCCCCCAGCCCCCCGATGTGGGCTCCTCGGAC
CCTCTGAGCATGGTGGGACCTTCCCAGGGCCGAAGCCCCAGCTACGCTTCCTGAAGCCA

| | | | |
|---|---|---|---|
| NOV6f, SNP 13374917 | | | |
| Protein Sequence | SEQ ID NO: 62 | 209 aa | MW at 22327.9kD |

MDSDETGFEHSGLWVSVLAGLLLGACQAHPIPDSSPLLQFGGQVRQRYLYTDDARQTEAHLEIREDGTVGGAA
DQSPESLLQLKALKPGVIQILGVKTSRFLCQRPDGALYGSLHFDPEACSFRELLLEDGYNVYQSEAHGLPLHL
PGNKSPHRDPAPRGPARFLPLPGLPPALPEPPGILAPQPPDVGSSDPLSMVGPSQGRSPSYAS

| | | |
|---|---|---|
| NOV6g, SNP 13374918 | SEQ ID NO: 63 | 643 bp |
| DNA Sequence | ORF Start: ATG at 9 | ORF Stop: TGA at 636 |

AGCCATTGATGGACTCGGACGAGACCGGGTTCGAGCACTCAGGACTGTGGGTTTCTGTGCTGGCTGGTCCTCT
GCTGGGAGCCTGCCAGGCACACCCCATCCCTGACTCCAGTCCTCTCCTGCAATTCGGGGGCCAAGTCCGGCAG
CGGTACCTCTACACAGATGATGCCCAGCAGACAGAAGCCCACCTGGAGATCAGGGAGGATGGGACGGTGGGGG
GCGCTGCTGACCAGAGCCCCGAAAGTCTCCTGCAGCTGAAAGCCTTGAAGCCGGGAGTTATTCAAATCTTGGG
AGTCAAGACATCCAGGTTCCTGTGCCAGCGGCCAGATGGGGCCCTGTATGGATCGCTCCACTTTGACCCTGAG
GCCTGCAGCTTCCGGGAGCTGCTTCTTGAGGACGGATACAATGTTTACCAGTCCGAAGCCCACGGCCTCCCGC
TGCACCTGCCAGGGAACAAGTCCCCACACCGGGACCCTGCACCCCGAGGACCAGCTCGCTTCCTGCCACTACC
AGGCCTGCCCCCCGCACTCCCGGAGCCACCCGGAATCCTGGCCCCCCAGCCCCCCGATGTGGGCTCCTCGGAC
CCTCTGAGCATGGTGGGACCTTCCCAGGGCCGAAGCCCCAGCTACGCTTCCTGAAGCCA

| | | | |
|---|---|---|---|
| NOV6g, SNP 13374918 | | | |
| Protein Sequence | SEQ ID NO: 64 | 209 aa | MW at 22283.8kD |

MDSDETGFEHSGLWVSVLAGPLLGACQAHPIPDSSPLLQFGGQVRQRYLYTDDAQQTEAHLEIREDGTVGGAA
DQSPESLLQLKALKPGVIQILGVKTSRFLCQRPDGALYGSLHFDPEACSFRELLLEDGYNVYQSEAHGLPLHL
PGNKSPHRDPAPRGPARFLPLPGLPPALPEPPGILAPQPPDVGSSDPLSMVGPSQGRSPSYAS

| | | |
|---|---|---|
| NOV6h, SNP 13374919 | SEQ ID NO: 65 | 643 bp |
| DNA Sequence | ORF Start: ATG at 9 | ORF Stop: TGA at 636 |

AGCCATTGATGGACTCGGACGAGACCGGGTTCGAGCACTCAGGACTGTGGGTTTCTGCGCTGGCTGGTCTTCT
GCTGGGAGCCTGCCAGGCACACCCCATCCCTGACTCCAGTCCTCTCCTGCAATTCGGGGGCCAAGTCCGGCAG
CGGTACCTCTACACAGATGATGCCCAGCAGACAGAAGCCCACCTGGAGATCAGGGAGGATGGGACGGTGGGGG
GCGCTGCTGACCAGAGCCCCGAAAGTCTCCTGCAGCTGAAAGCCTTGAAGCCGGGAGTTATTCAAATCTTGGG
AGTCAAGACATCCAGGTTCCTGTGCCAGCGGCCAGATGGGGCCCTGTATGGATCGCTCCACTTTGACCCTGAG
GCCTGCAGCTTCCGGGAGCTGCTTCTTGAGGACGGATACAATGTTTACCAGTCCGAAGCCCACGGCCTCCCGC
TGCACCTGCCAGGGAACAAGTCCCCACACCGGGACCCTGCACCCCGAGGACCAGCTCGCTTCCTGCCACTACC
AGGCCTGCCCCCCGCACTCCCGGAGCCACCCGGAATCCTGGCCCCCCAGCCCCCCGATGTGGGCTCCTCGGAC
CCTCTGAGCATGGTGGGACCTTCCCAGGGCCGAAGCCCCAGCTACGCTTCCTGAAGCCA

| | | | |
|---|---|---|---|
| NOV6h, SNP 13374919 | | | |
| Protein Sequence | SEQ ID NO: 66 | 209 aa | MW at 22271.7kD |

MDSDETGFEHSGLWVSALAGLLLGACQAHPIPDSSPLLQFGGQVRQRYLYTDDAQQTEAHLEIREDGTVGGAA
DQSPESLLQLKALKPGVIQILGVKTSRFLCQRPDGALYGSLHFDPEACSFRELLLEDGYNVYQSEAHGLPLHL
PGNKSPHRDPAPRGPARFLPLPGLPPALPEPPGILAPQPPDVGSSDPLSMVGPSQGRSPSYAS

| | | |
|---|---|---|
| NOV6i, SNP 13374920 | SEQ ID NO: 67 | 643 bp |
| DNA Sequence | ORF Start: ATG at 9 | ORF Stop: TGA at 636 |

AGCCATTGATGGACTCGGACGAGATCGGGTTCGAGCACTCAGGACTGTGGGTTTCTGTGCTGGCTGGTCTTCT
GCTGGGAGCCTGCCAGGCACACCCCATCCCTGACTCCAGTCCTCTCCTGCAATTCGGGGGCCAAGTCCGGCAG
CGGTACCTCTACACAGATGATGCCCAGCAGACAGAAGCCCACCTGGAGATCAGGGAGGATGGGACGGTGGGGG
GCGCTGCTGACCAGAGCCCCGAAAGTCTCCTGCAGCTGAAAGCCTTGAAGCCGGGAGTTATTCAAATCTTGGG
AGTCAAGACATCCAGGTTCCTGTGCCAGCGGCCAGATGGGGCCCTGTATGGATCGCTCCACTTTGACCCTGAG
GCCTGCAGCTTCCGGGAGCTGCTTCTTGAGGACGGATACAATGTTTACCAGTCCGAAGCCCACGGCCTCCCGC
TGCACCTGCCAGGGAACAAGTCCCCACACCGGGACCCTGCACCCCGAGGACCAGCTCGCTTCCTGCCACTACC
AGGCCTGCCCCCCGCACTCCCGGAGCCACCCGGAATCCTGGCCCCCCAGCCCCCCGATGTGGGCTCCTCGGAC
CCTCTGAGCATGGTGGGACCTTCCCAGGGCCGAAGCCCCAGCTACGCTTCCTGAAGCCA

| | | | |
|---|---|---|---|
| NOV6i, SNP 13374920 | | | |
| Protein Sequence | SEQ ID NO: 68 | 209 aa | MW at 22311.9kD |

MDSDEIGFEHSGLWVSVLAGLLLGACQAHPIPDSSPLLQFGGQVRQRYLYTDDAQQTEAHLEIREDGTVGGAA
DQSPESLLQLKALKPGVIQILGVKTSRFLCQRPDGALYGSLHFDPEACSFRELLLEDGYNVYQSEAHGLPLHL
PGNKSPHRDPAPRGPARFLPLPGLPPALPEPPGILAPQPPDVGSSDPLSMVGPSQGRSPSYAS

| | | |
|---|---|---|
| NOV6j, SNP 13374921 | SEQ ID NO: 69 | 643 bp |
| DNA Sequence | ORF Start: ATG at 9 | ORF Stop: TGA at 636 |

AGCCATTGATGGACTCGGACGAGGCCGGGTTCGAGCACTCAGGACTGTGGGTTTCTGTGCTGGCTGGTCTTCT
GCTGGGAGCCTGCCAGGCACACCCCATCCCTGACTCCAGTCCTCTCCTGCAATTCGGGGGCCAAGTCCGGCAG
CGGTACCTCTACACAGATGATGCCCAGCAGACAGAAGCCCACCTGGAGATCAGGGAGGATGGGACGGTGGGGG
GCGCTGCTGACCAGAGCCCCGAAAGTCTCCTGCAGCTGAAAGCCTTGAAGCCGGGAGTTATTCAAATCTTGGG
AGTCAAGACATCCAGGTTCCTGTGCCAGCGGCCAGATGGGGCCCTGTATGGATCGCTCCACTTTGACCCTGAG
GCCTGCAGCTTCCGGGAGCTGCTTCTTGAGGACGGATACAATGTTTACCAGTCCGAAGCCCACGGCCTCCCGC
TGCACCTGCCAGGGAACAAGTCCCCACACCGGGACCCTGCACCCCGAGGACCAGCTCGCTTCCTGCCACTACC
AGGCCTGCCCCCCGCACTCCCGGAGCCACCCGGAATCCTGGCCCCCCAGCCCCCCGATGTGGGCTCCTCGGAC
CCTCTGAGCATGGTGGGACCTTCCCAGGGCCGAAGCCCCAGCTACGCTTCCTGAAGCCA

| | | | |
|---|---|---|---|
| NOV6j, SNP 13374921 | | | |
| Protein Sequence | SEQ ID NO: 70 | 209 aa | MW at 22269.8kD |

MDSDEAGFEHSGLWVSVLAGLLLGACQAHPIPDSSPLLQFGGQVRQRYLYTDDAQQTEAHLEIREDGTVGGAA
DQSPESLLQLKALKPGVIQILGVKTSRFLCQRPDGALYGSLHFDPEACSFRELLLEDGYNVYQSEAHGLPLHL
PGNKSPHRDPAPRGPARFLPLPGLPPALPEPPGILAPQPPDVGSSDPLSMVGPSQGRSPSYAS

| | | |
|---|---|---|
| NOV6k, SNP 13374922 | SEQ ID NO: 71 | 643 bp |
| DNA Sequence | ORF Start: ATG at 9 | ORF Stop: TGA at 636 |

AGCCATTGATGGACTCGGACGAGACCGGGTTCGAGCACTCAGGACTGTGGGTTTCTGTGCTGGCTGGTCTTCT
GCTGGGAGCCTGCCAGGCACACCCCATCCCTGACTCCAGTCCTCTCCTGCAATTCGGGGGCCAAGTCCGGCAG
CGGTACCTCTACACAGATGATGCCCAGCAGACAGAAGCCCACCTGGAGATCAGGGAGGATGGGACGGTGGGGG
GCGCTGCTGACCAGAGCCCCGAAAGTCTCCTGCAGCTGAAAGCCTTGAAGCCGGGAGTTATTCAAATCTTGGG
AGTCAAGACATCCAGGTTCCTGTGCCAGCGGCCAGATGGGGCCCTGTATGGATCGCTCCACTTTGACCCTGAG
GCCTGCAGCTTCCGGGAGCTGCTTCTTGAGGACGGATACAATGTTTACCAGTCCGAAGCCCACGGCCTCCCGC
TGCACCAGCCAGGGAACAAGTCCCCACACCGGGACCCTGCACCCCGAGGACCAGCTCGCTTCCTGCCACTACC
AGGCCTGCCCCCCGCACTCCCGGAGCCACCCGGAATCCTGGCCCCCCAGCCCCCCGATGTGGGCTCCTCGGAC
CCTCTGAGCATGGTGGGACCTTCCCAGGGCCGAAGCCCCAGCTACGCTTCCTGAAGCCA

| | | | |
|---|---|---|---|
| NOV6k, SNP 13374922 | | | |
| Protein Sequence | SEQ ID NO: 72 | 209 aa | MW at 22314.8kD |

MDSDETGFEHSGLWVSVLAGLLLGACQAHPIPDSSPLLQFGGQVRQRYLYTDDAQQTEAHLEIREDGTVGGAA
DQSPESLLQLKALKPGVIQILGVKTSRFLCQRPDGALYGSLHFDPEACSFRELLLEDGYNVYQSEAHGLPLHQ
PGNKSPHRDPAPRGPARFLPLPGLPPALPEPPGILAPQPPDVGSSDPLSMVGPSQGRSPSYAS

| | | |
|---|---|---|
| NOV6l, SNP 13382579 | SEQ ID NO: 73 | 643 bp |
| DNA Sequence | ORF Start: ATG at 9 | ORF Stop: TGA at 636 |

AGCCATTGATGGACTCGGACGAGACCGGGTTCGAGCACTCAGGACTGTGGGTTTCTGTGCTGGCTGGTCTTCT
GCTGGGAGCCTGCCAGGCACACCCCATCCCTGACTCCAGTCCTCTCCTGCAATTCGGGGGCCAAGTCCGGCAG
CGGTACCTCTACACAGATGATGCCCAGCAGACAGAAGCCCACCTGGAGATCAGGGAGGATGGGACGGTGGGGG
GCGCTGCTGACCAGAGCCCCGAAAGTCTCCTGCAGCTGAAAGCCTTGAAGCCGGGAGTTATTCAAATCTTGGG
AGTCAAGACATCCAGGTTCCTGTGCCAGCGGCCAGATGGGGCCCTGTATGGATCGCTCCACTTTGACCCTGAG
GCCTGCAGCTTCCGGGAGCTGCTTCTTGAGGACGGATACAATGTTTACCAGTCCGAAGCCCACGGCCTCCCGC
TGCACCTGCCAGGGAACAAGTCCCCACACCGGGACCCTGCACCCCGAGGACCAGCTCGCTTCCTGCCACTACC
AGGCCAGCCCCCCGCACTCCCGGAGCCACCCGGAATCCTGGCCCCCCAGCCCCCCGATGTGGGCTCCTCGGAC
CCTCTGAGCATGGTGGGACCTTCCCAGGGCCGAAGCCCCAGCTACGCTTCCTGAAGCCA

| | | | |
|---|---|---|---|
| NOV6l, SNP 13382579 | | | |
| Protein Sequence | SEQ ID NO: 74 | 209 aa | MW at 22314.8kD |

MDSDETGFEHSGLWVSVLAGLLLGACQAHPIPDSSPLLQFGGQVRQRYLYTDDAQQTEAHLEIREDGTVGGAA
DQSPESLLQLKALKPGVIQILGVKTSRFLCQRPDGALYGSLHFDPEACSFRELLLEDGYNVYQSEAHGLPLHL
PGNKSPHRDPAPRGPARFLPLPGQPPALPEPPGILAPQPPDVGSSDPLSMVGPSQGRSPSYAS

| | | |
|---|---|---|
| NOV6m, CG54470 | SEQ ID NO: 75 | 643 bp |
| DNA Sequence | ORF Start: ATG at 9 | ORF Stop: TGA at 636 |

AGCCATTGATGGACTCGGACGAGX₁X₂CGGGTTCGAGCACTCAGGACTGTGGGTTTCTGX₃GCTGGCTGGTC
X₄TCTGCTGGGAGCCTGCCAGGCACACCCCATCCCTGACTCCAGTCCTCTCCTGCAATTCGGGGGCCAAGTCC
GGCAGCGGTACCTCTACACAGATGATGCCCX₅GCAGACAGAAGCCCACCTGGAGATCAGGGAGGATGGGACGG
TGGGGGGCGCTGCTGACCAGAGCCCCGAAAGTCTCCTGCAGCTGAAAGCCTTGAAGCCGGGAGTTATTX₆AAA
TCTTGGGAGTCAAGACATCCX₇GGTTCCTGTGCCAGCGGCCAGATGGGGCCCX₈GTATGGATCGCTCCACTTT
GACCCTGAGGCCTGCAGCTTCCGGGAGCTGCTTCTTGAGGACGGATACAATGTTTACCAGTCCGAAGCCCACG
GCCTCCCGCTGCACCX₉GCCAGGGAACAAGTCCCCACACCGGGACCCTGCACCCCGAGGACCAGCTCGCTTCC
TGCCACTACCAGGCCX₁₀GCCCCCCGCACTCCCGGAGCCACCCGGAATCCTGGCCCCCCAGCCCCCCGATGTG
GGCTCCTCGGACCCTCTGAGCATGGTGGGACCTTCCCAGGGCCGAAGCCCCAGCTACGCTTCCTGAAGCCA
[Wherein each of residues X₁, X₅, X₇, is either A or G; X₂, X₃, X₄, X₆,
X₈, is either C or T; and X₉, X₁₀ is either T or A.]

| | | | |
|---|---|---|---|
| NOV6m, CG54470 | | | |
| Protein Sequence | SEQ ID NO: 76 | 209 aa | MW at 22299.8kD |

MDSDEZ₁GFEHSGLWVSZ₂LAGZ₃LLGACQAHPIPDSSPLLQFGGQVRQRYLYTDDAZ₄QTEAHLEIREDGTV
GGAADQSPESLLQLKALKPGVIZ₅ILGVKTSZ₆FLCQRPDGAZ₇YGSLHFDPEACSFRELLLEDGYNVYQSEA
HGLPLHZ₈PGNKSPHRDPAPRGPARFLPLPGZ₉PPALPEPPGILAPQPPDVGSSDPLSMVGPSQGRSPSYAS
[Wherein residue Z₁ is T or A or I; Z₂ is V or A; Z₃ is L or P; Z₄ is Q
or R; Z₅ is Q or STOP; Z₆ is R or G; Z₇ is L or P; Z₈ is L or Q; and Z₉
is L or Q.]

[0325] A ClustalW comparison of the protein sequences of NOV6a through NOV61 yields the following sequence alignment shown in Table 6B.

[image]

[0326] Further analysis of the NOV6b protein yielded the following properties shown in Table 6C.

TABLE 6C
Protein Sequence Properties NOV6b

| SignalP | No signal sequence cleavage site detected | | | |
|---|---|---|---|---|
| analysis: | | | | |
| PSORT II | PSG: a new signal peptide prediction method | | | |
| analysis: | N-region: length 5; pos. chg 0; neg. chg 1 | | | |
| | H-region: length 11; peak value 0.00 | | | |
| | PSG score: −4.40 | | | |
| | GvH: von Heijne's method for signal seq. recognition | | | |
| | GvH score (threshold: −2.1): −4.96 | | | |
| | possible cleavage site: between 18 and 19 | | | |
| | >>> Seems to have no N-terminal signal peptide | | | |
| | ALOM: Klein et al's method for TM region allocation | | | |
| | Init position for calculation: 1 | | | |
| | Tentative number of TMS(s) for the threshold 0.5: 0 | | | |
| | number of TMS(s) . . . fixed | | | |
| | PERIPHERAL Likelihood = 3.13 (at 55) | | | |
| | ALOM score: 3.13 (number of TMSs: 0) | | | |
| | MITDISC: discrimination of mitochondrial targeting seq | | | |
| | R content: | 2 | Hyd Moment(75): | 7.83 |
| | Hyd Moment(95): | 8.24 | G content: | 3 |
| | D/E content: | 2 | S/T content: | 5 |

Score: −4.65
Gavel: prediction of cleavage sites for mitochondrial preseq
R-2 motif at 29 QRY|LY
NUCDISC: discrimination of nuclear localization signals
pat4: none
pat7: none
bipartite: none
content of basic residues: 8.6%
NLS Score: −0.47
NNCN: Reinhardt's method for Cytplasmic/Nuclear discrimination
Prediction: nuclear
Reliability: 89
Psort Results (see Details):
45.0%: cytoplasm
30.0%: microbody (peroxisome)
26.8%: lysosome (lumen)
10.0%: mitochondrial matrix space

[0327] A search of the NOV6b protein against the Geneseq database, a proprietary database that contains sequences published in patents and patent publication, yielded several homologous proteins shown in Table 6D.

TABLE 6D
Geneseq Results for NOV6b

| | | NOV6b | Identities/ | |
|---|---|---|---|---|
| | | Residues/ | Similarities for | |
| Geneseq | Protein/Organism/Length [Patent #, | Match | the Matched | Expect |
| Identifier | Date] | Residues | Region | Value |
| AAE18826 | Human FGF-21 protein - Homo sapiens, | 1 . . . 167 | 167/167 (100%) | 8.9e−91 |
| | 209 aa. [US2002001825-A1, | 25 . . . 194 | 205/205 (100%) | |
| | 03 JAN. 2002] | | | |
| AAE05078 | Human fibroblast growth factor (FGF) | 1 . . . 167 | 167/167 (100%) | 8.9e−91 |
| | homologue, zFGF11 protein - Homo | 1 . . . 205 | 205/205 (100%) | |
| | sapiens, 208 aa. [2000US-0477886, | | | |
| | 05 JAN. 2000] | | | |
| AAB68417 | Amino acid sequence of human | 1 . . . 167 | 167/167 (100%) | 8.9e−91 |
| | fibroblast growth factor-21 (FGF-21) - | 1 . . . 206 | 206/206 (100%) | |
| | Homo sapiens, 209 aa. | | | |
| | [WO200136640-A2, 25 MAY 2001] | | | |
| AAG65667 | Human fibroblast growth factor (FGF)-21 - | 1 . . . 167 | 167/167 (100%) | 8.9e−91 |
| | Homo sapiens, 209 aa. | 26 . . . 206 | 206/206 (100%) | |
| | [WO200172957-A2, 04 OCT. 2001] | | | |

[0328] In a BLAST search of public sequence databases, the NOV6b protein was found to have homology to the proteins shown in the BLASTP data in Table 6E.

TABLE 6E
Public BLASTP Results for NOV6b

| | | NOV6b | | |
|---|---|---|---|---|
| Protein | | Residues/ | Identities/ | |
| Accession | | Match | Similarities for the | Expect |
| Number | Protein/Organism/Length | Residues | Matched Portion | Value |
| Q9NSA1 | Fibroblast growth factor-21 | 1 . . . 167 | 167/167 (100%) | 9.3e−91 |
| | precursor (FGF-21) - Homo sapiens | 1 . . . 206 | 206/206 (100%) | |
| | (Human), 209 aa. | | | |
| Q8N683 | Fibroblast growth factor 21 - Homo | 1 . . . 167 | 205/206 (99%) | 9.3e−91 |
| | sapiens (Human), 209 aa. | 1 . . . 206 | 205/206 (99%) | |
| CAC51204 | Sequence 1 from Patent | 1 . . . 167 | 205/206 (99%) | 5.1e−90 |
| | WO0149849 - Homo sapiens | 1 . . . 205 | 205/206 (99%) | |
| | (Human), 208 aa. | | | |

[0329] PFam analysis predicts that the NOV6b protein contains the domains shown in the Table 6F. Specific amino acid residues of NOV6b for each domain is shown in column 2, equivalent domains in the other NOV6 proteins of the invention are also encompassed herein.

TABLE 6F
Domain Analysis of NOV6b

| | NOV6b Match Region | | |
|---|---|---|---|
| Pfam Domain | Amino Acid Residues: | Score | Expect Value |
| FGF | 15 . . . 140 | 27.7 | 2.8e−08 |

### Example 7

### NOV7, CG55051, Alpha-2 Macroglobulin-like

[0330] The NOV7 family of novel nucleic acids and polypeptides clones includes NOV7a through NOV7c, SEQ ID Nos: 77-82, and the nucleotide and encoded polypeptide sequences are shown in Table 7A. In a particular embodiment NOV7 nucleic acid sequence is SEQ ID NO:81, wherein residue X₁ is either T or C. Nucleic acid sequence SEQ ID NO:81 encodes polypeptide SEQ ID NO:82, wherein residue Z₁ is I or T. Equivalent nucleic acid and polypeptide substitutions apply to other NOV7 sequences as would be appreciated by one of skill in the art, and are emcompassed in the present invention.

TABLE 7A
NOV7 Sequence Analysis

| | | |
|---|---|---|
| NOV7a, CG55051-02 | SEQ ID NO: 77 | 1788 bp |
| DNA Sequence | ORF Start: at 1 | ORF Stop: end of sequence |

GAAGAACTTCCAACTACCTGGTGACATTACCAGCCCAGGCTAAATTTCCCCTCCGTTCAGAAGGTTTGTTTGG
ACCTGAGCCCTGGGTACAGTGATGTTAAATTCACGGTTACTCTGGAGACCAAGGACAAGACCCAGAAGTTGCT
AGAATACTCTGGACTGAAGAAGAGGCACTTACATTGTATCTCCTTTCTTGTACCACCTCCTGCTGGTGGCACA
GAAGAAGTGGCCACAATCCGGGTGTCGGGAGTTGGAAATAACATCAGCTTTGAGGAGAAGAAAAAGGTTCTAA
TTCAGAGGCAGGGGAACGGCACCTTTGTACAGACTGACAAACCTCTCTACACCCCAGGGCAGCAAGTGTATTT
CCGCATTGTCACCATGGATAGCAACTTCGTTCCAGTGAATGACAAGTACTCCATGGTGGAACTACAGGATCCA
AATAGCAACAGGATTGCACAGTGGCTGGAAGTGGTACCTGAGCAAGGCATTGTAGACCTGTCCTTCCAACTGG
CACCAGAGGCAATGCTGGGCACCTACACTGTGGCAGTGGCTGAGGGCAAGACCTTTGGTACTTTCAGTGTGGA
GGAATATGTGCTGCCGAAGTTTAAGGTGGAAGTGGTGGAACCCAAGGAGTTATCAACGGTGCAGGAATCTTTC
TTAGTAAAAATTTGTTGTAGGTACACCTATGGAAAGCCCATGCTAGGGGCAGTGCAGGTATCTGTGTGTCAGA
AGGCAAATACTTACTGGTATCGAGAGGTGGAACGGGAACAGCTTCCTGACAAATGCAGGAACCTCTCTGGACA
GACTGACAAAACAGGATGTTTCTCAGCACCTGTGGACATGGCCACCTTTGACCTCATTGGATATGCGTACAGC
CATCAAATCAATATTGTGGCTACTGTTGTGGAGGAAGGGACAGGTGTGGAGGCCAATGCCACTCAGAATATCT
ACATTTCTCCACAAATGGGATCAATGACCTTTGAAGACACCAGCAATTTTTACCATCCAAATTTCCCCTTCAG
TGGGAAGATAAGAGTTAGGGGCCATGATGACTCCTTCCTCAAGAACCATCTAGTGTTTCTGGTGATTTATGGC
ACAAATGGAACCTTCAACCAGACCCTGGTTACTGATAACAATGGCCTAGCTCCCTTTACCTTGGAGACATCCG
GTTGGAATGGGACAGACGTTTCTCTGGAGGGAAAGTTTCAAATGGAAGACTTAGTATATAATCCGGAACAAGT
GCCACGTTACTACCAAAATGCCTACCTGCACCTGCGACCCTTCTACAGCACAACCCGCAGCTTCCTTGGCATC
CACCGGCTAAACGGCCCCTTGAAATGTGGCCAGCCCCAGGAAGTGCTGGTGGATTATTACATCGACCCGGCCG
ATGCAAGCCCTGACCAAGAGATCAGCTTCTCCTACTATTTAATAGGGAAAGGAAGTTTGGTGATGGAGGGGCA
GAAACACCTGAACTCTAAGAAGAAAGGACTGAAAGCCCCCTTCTCTCTCTCACTGACCTTCACTTCGAGACTG
GCCCCTGATCCTTCCCTGGTGATCTATGCCATTTTTCCCAGTGGAGGTGTTGTAGCTGACAAAATTCAGTTCT
CAGTCGAGATGTGCTTTGACAATCAGGTTTCCCTTGGCTTCTCCCCCTCCCAGCAGCTTCCAGGAGCAGAAGT
GGAGCTGCAGCTGCAGGCAGCTCCCGGATCCCTGTGTGCGCTCCGGGCGGTGGATGAGAGTGTCTTACTGCTT
AGGCCAGACAGAGAGCTGAGCAACCGCTCTGTCTAT

| | | | |
|---|---|---|---|
| NOV7a, CG55051-02 | | | |
| Protein Sequence | SEQ ID NO: 78 | 596 aa | MW at 66508.0kD |

EELPNYLVTLPARLNFPSVQKVCLDLSPGYSDVKFTVTLETKDKTQKLLEYSGLKKRHLHCISFLVPPPAGGT
EEVATIRVSGVGNNISFEEKKKVLIQRQGNGTFVQTDKPLYTPGQQVYFRIVTMDSNFVPVNDKYSMVELQDP
NSNRIAQWLEVVPEQGIVDLSFQLAPEAMLGTYTVAVAEGKTFGTFSVEEYVLPKFKVEVVEPKELSTVQESF
LVKICCRYTYGKPMLGAVQVSVCQKANTYWYREVEREQLPDKCRNLSGQTDKTGCFSAPVDMATFDLIGYAYS
HQINIVATVVEEGTGVEANATQNIYISPQMGSMTFEDTSNFYHPNFPFSGKIRVRGHDDSFLKNHLVFLVIYG
TNGTFNQTLVTDNNGLAPFTLETSGWNGTDVSLEGKFQMEDLVYNPEQVPRYYQNAYLHLRPFYSTTRSFLGI
HRLNGPLKCGQPQEVLVDYYIDPADASPDQEISFSYYLIGKGSLVMEGQKHLNSKKKGLKAPFSLSLTFTSRL
APDPSLVIYAIFPSGGVVADKIQFSVEMCFDNQVSLGFSPSQQLPGAEVELQLQAAPGSLCALRAVDESVLLL
RPDRELSNRSVY

| | | |
|---|---|---|
| NOV7b, SNP 13377623 | SEQ ID NO: 79 | 4492 bp |
| DNA Sequence | ORF Start: ATG at 1 | ORF Stop: TGA at 4375 |

ATGTGGGCTCAGCTCCTTCTAGGAATGTTGGCCCTATCACCAGCCATTGCAGAAGAACTTCCAAACTACCTGG
TGACATTACCAGCCCGGCTAAATTTCCCCTCCGTTCAGAAGGTTTGTTTGGACCTGAGCCCTGGGTACAGTGA
TGTTAAATTCACGGTTACTCTGGAGACCAAGGACAAGACCCAGAAGTTGCTAGAATACTCTGGACTGAAGAAG
AGGCACTTACATTGTATCTCCTTTCTTGTACCACCTCCTGCTGGTGGCACAGAAGAAGTGGCCACAATCCGGG
TGTCGGGAGTTGGAAATAACATCAGCTTTGAGGAGAAGAAAAAGGTTCTAATTCAGAGGCAGGGGAACGGCAC
CTTTGTACAGACTGACAAACCTCTCTACACCCCAGGGCAGCAAGTGTATTTCCGCATTGTCACCATGGATAGC
AACTTCGTTCCAGTGAATGACAAGTACTCCATGGTGGAACTACAGGATCCAAATAGCAACAGGATTGCACAGT
GGCTGGAAGTGGTACCTGAGCAAGGCATTGTAGACCTGTCCTTCCAACTGGCACCAGAGGCAATGCTGGGCAC
CTACACTGTGGCAGTGGCTGAGGGCAAGACCTTTGGTACTTTCAGTGTGGAGGAATATGTGCTTTCTCCATTT
CTCCTTTTACTCTCTTCAGTGCTGCCGAAGTTTAAGGTGGAAGTGGTGGAACCCAAGGAGTTATCAACGGTGC
AGGAATCTTTCTTAGTAAAAATTTGTTGTAGGTACACCTATGGAAAGCCCATGCTAGGGGCAGTGCAGGTATC
TGTGTGTCAGAAGGCAAATACTTACTGGTATCGAGAGGTGGAACGGGAACAGCTTCCTGACAAATGCAGGAAC
CTCTCTGGACAGACTGACAAAACAGGATGTTTCTCAGCACCTGTGGACATGGCCACCTTTGACCTCATTGGAT
ATGCGTACAGCCATCAAATCAATATTGTGGCTACTGTTGTGGAGGAAGGGACAGGTGTGGAGGCCAATGCCAC
TCAGAATATCTACACTTCTCCACAAATGGGATCAATGACCTTTGAAGACACCAGCAATTTTTACCATCCAAAT
TTCCCCTTCAGTGGGAAGATGCTGCTCAAGTTTCCGCAAGGCGGTGTGCTCCCTTGCAAGAACCATCTAGTGT
TTCTGGTGATTTATGGCACAAATGGAACCTTCAACCAGACCCTGGTTACTGATAACAATGGCCTAGCTCCCTT
TACCTTGGAGACATCCGGTTGGAATGGGACAGACGTTTCTCTGGAGGGAAAGTTTCAAATGGAAGACTTAGTA
TATAATCCGGAACAAGTGCCACGTTACTACCAAAATGCCTACCTGCACCTGCGACCCTTCTACAGCACAACCC
GCAGCTTCCTTGGCATCCACCGGCTAAACGGCCCCTTGAAATGTGGCCAGCCCCAGGAAGTGCTGGTGGATTA
TTACATCGACCCGGCCGATGCAAGCCCTGACCAAGAGATCAGCTTCTCCTACTATTTAATAGGGAAAGGAAGT
TTGGTGATGGAGGGGCAGAAACACCTGAACTCTAAGAAGAAAGGACTGAAAGCCTCCTTCTCTCTCTCACTGA
CCTTCACTTCGAGACTGGCCCCTGATCCTTCCCTGGTGATCTATGCCATTTTTCCCAGTGGAGGTGTTGTAGC
TGACAAAATTCAGTTCTCAGTCGAGATGTGCTTTGACAATCAGCAGCTTCCAGGAGCAGAAGTGGAGCTGCAG
CTGCAGGCAGCTCCCGGATCCCTGTGTGCGCTCCGGGCGGTGGATGAGAGTGTCTTACTGCTTAGGCCAGACA
GAGAGCTGAGCAACCGCTCTGTCTATGGGATGTTTCCATTCTGGTATGGTCACTACCCCTATCAAGTGGCTGA
GTATGATCAGTGTCCAGTGTCTGGCCCATGGGACTTTCCTCAGCCCCTCATTGACCCAATGCCCCAAGGGCAT
TCGAGCCAGCGTTCCATTATCTGGAGGCCCTCGTTCTCTGAAGGCACGGACCTTTTCAGCTTTTTCCGGGACG
TGGGCCTGAAAATACTGTCCAATGCCAAAATCAAGAAGCCAGTAGATTGCAGTCACAGATCTCCAGAATACAG
CACTGCTATGGGTGGCGGTGGTCATCCAGAGGCTTTTGAGTCATCAACTCCTTTACATCAAGCAGAGGATTCT
CAGGTCCGCCAGTACTTCCCAGAGACCTGGCTCTGGGATCTGTTTCCTATTGGTAACTCGGGGAAGGAGGCGG
TCCACGTCACAGTTCCTGACGCCATCACCGAGTGGAAGGCGATGAGTTTCTGCACTTCCCAGTCAAGAGGCTT
CGGGCTTTCACCCACTGTTGGACTAACTGCTTTCAAGCCGTTCTTTGTTGACCTGACTCTCCCTTACTCAGTA
GTCCGTGGGGAATCCTTTCGTCTTACTGCCACCATCTTCAATTACCTAAAGGATTGCATCAGGGTTCAGACTG
ACCTGGCTAAATCGCATGAGTACCAGCTAGAATCATGGGCAGATTCTCAGACCTCCAGTTGTCTCTGTGCTGA
TGACGCAAAACCCACCACTGGAACATCACAGCTGTCAAATTGGGTCACATTAAACTTTACTATTAGTACAAAG
ATTCTGGACAGCAATGAACCATGTGGGGGCCAGAAGGGGTTTGTTCCCCAAAAGGGCCGAAGTGACACGCTCA
TCAAGCCAGTTCTCGTCAAACCTGAGGGAGTCCTGGTGGAGAAGACACACAGCTCATTGCTGTGCCCAAAAGG
AGGAAAGGTGGCATCTGAATCTGTCTCCCTGGAGCTCCCAGTGGACATTGTTCCTGACTCGACCAAGGCTTAT
GTTACGGTTCTGGGAGACATTATGGGCACAGCCCTGCAGAACCTGGATGGTCTGGTGCAGATGCCCAGTGGCT
GTGGCGAGCAGAACATGGTCTTGTTTGCTCCCATCATCTATGTCTTGCAGTACCTGGAGAAGGCAGGGCTGCT
GACGGAGGAGATCAGGTCTCGGGCAGTGGGTTTCCTGGAAATAGGGTACCAGAAGGAGCTGATGTACAAACAC
AGCAATGGCTCATACAGTGCCTTTGGGGAGCGAGATGGAAATGGAAACACATGGCTGACAGCGTTTGTCACAA
AATGCTTTGGCCAAGCTCAGAAATTCATCTTCATTGATCCCAAGAACATCCAGGATGCTCTCAAGTGGATGGC
AGGAAACCAGCTCCCCAGTGGCTGCTATGCCAACGTGGGAAATCTCCTTCACACAGCTATGAAGGGTGGTGTT
GATGATGAGGTCTCCTTGACTGCGTATGTCACAGCTGCATTGCTGGAGATGGGAAAGGATGTAGATGACCCAA
TGGTGAGTCAGGGTCTACGGTGTCTCAAGAATTCGGCCACCTCCACGACCAACCTCTACACACAGGCCCTGTT
GGCTTACATTTTCTCCCTGGCTGGGGAAATGGACATCAGAAACATTCTCCTTAAACAGTTAGATCAACAGGCT
ATCATCTCAGGAGAATCCATTTACTGGAGCCAGAAACCTACTCCATCATCGAACGCCAGCCCTTGGTCTGAGC
CTGCGGCTGTAGATGTGGAACTCACAGCATATGCATTGTTGGCCCAGCTTACCAAGCCCAGCCTGACTCAAAA
GGAGATAGCGAAGGCCACTAGCATAGTGGCTTGGTTGGCCAAGCAACACAATGCATATGGGGGCTTCTCTTCT
ACTCAGGATACTGTAGTTGCTCTCCAAGCTCTTGCCAAATATGCCACTACdGCCTACATGCCATCTGAGGAGA
TCAACCTGGTTGTAAAATCCACTGAGAATTTCCAGCGCACATTCAACATACAGTCAGTTAACAGATTGGTATT
TCAGCAGGATACCCTGCCCAATGTCCCTGGAATGTACACGTTGGAGGCCTCAGGCCAGGGCTGTGTCTATGTG
CAGACGGTGTTGAGATACAAATATTCTCCCTCCCACAATATGAAGACCTTTAGTCTTAGTGTGGAAATAGGAA
AAGCTAGATGTGAGCAGCCGACTTCACCTCGATCCTTGACTCTCACTATTCACACCAGTTATGTGGGGAGCCG
TAGCTCTTCCAATATGGCTATTGTGGAAGTGAAGATGCTATCTGGGTTCAGTCCCATGGAGGGCACCAATCAG
TTACTTCTCCAGCAACCCCTGGTGAAGAAGGTTGAATTTGGAACTGACACACTTAACATTTACTTGGATGAGC
TCATTAAGAACACTCAGACTTACACCTTCACCATCAGCCAAAGTGTGCTGGTCACCAACTTGAAACCAGCAAC
CATCAAGGTCTATGACTACTACCTACCAGATGAACAGGCAACAATTCAGTATTCTGATCCCTGTGAATGAGGA
TAGGAGCTGGAAACTCAATTAGTCCTCTGTGACATTTACTGGAGGGTGGAACATTCTTCTGTCGCTTGAAGCA
GAACTCATTCAATCAAATAATTTAATTTCTCTGACTAGT

| | | | |
|---|---|---|---|
| NOV7b, SNP 13377623 | | | |
| Protein Sequence | SEQ ID NO: 80 | 1458 aa | Mw at 161434.6kD |

MWAQLLLGMLALSPAIAEELPNYLVTLPARLNFPSVQKVCLDLSPGYSDVKFTVTLETKDKTQKLLEYSGLKK
RHLHCISFLVPPPAGGTEEVATIRVSGVGNNISFEEKKKVLIQRQGNGTFVQTDKPLYTPGQQVYFRIVTMDS
NFVPVNDKYSMVELQDPNSNRIAQWLEVVPEQGIVDLSFQLAPEAMLGTYTVAVAEGKTFGTFSVEEYVLSPF
LLLLSSVLPKFKVEVVEPKELSTVQESFLVKICCRYTYGKPMLGAVQVSVCQKANTYWYREVEREQLPDKCRN
LSGQTDKTGCFSAPVDMATFDLIGYAYSHQINIVATVVEEGTGVEANATQNIYTSPQMGSMTFEDTSNFYHPN
FPFSGKMLLKFPQGGVLPCKNHLVFLVIYGTNGTFNQTLVTDNNGLAPFTLETSGWNGTDVSLEGKFQMEDLV
YNPEQVPRYYQNAYLHLRPFYSTTRSFLGIHRLNGPLKCGQPQEVLVDYYIDPADASPDQEISFSYYLIGKGS
LVMEGQKHLNSKKKGLKASFSLSLTFTSRLAPDPSLVIYAIFPSGGVVADKIQFSVEMCFDNQQLPGAEVELQ
LQAAPGSLCALRAVDESVLLLRPDRELSNRSVYGMFPFWYGHYPYQVAEYDQCPVSGPWDFPQPLIDPMPQGH
SSQRSIIWRPSFSEGTDLFSFFRDVGLKILSNAKIKKPVDCSHRSPEYSTAMGGGGHPEAFESSTPLHQAEDS
QVRQYFPETWLWDLFPIGNSGKEAVHVTVPDAITEWKAMSFCTSQSRGFGLSPTVGLTAFKPFFVDLTLPYSV
VRGESFRLTATIFNYLKDCIRVQTDLAKSHEYQLESWADSQTSSCLCADDAKTHHWNITAVKLGHINFTISTK
ILDSNEPCGGQKGFVPQKGRSDTLIKPVLVKPEGVLVEKTHSSLLCPKGGKVASESVSLELPVDIVPDSTKAY
VTVLGDIMGTALQNLDGLVQMPSGCGEQNMVLFAPIIYVLQYLEKAGLLTEEIRSRAVGFLEIGYQKELMYKH
SNGSYSAFGERDGNGNTWLTAFVTKCFGQAQKFIFIDPKNIQDALKWMAGNQLPSGCYANVGNLLHTAMKGGV
DDEVSLTAYVTAALLEMGKDVDDPMVSQGLRCLKNSATSTTNLYTQALLAYIFSLAGEMDIRNILLKQLDQQA
IISGESIYWSQKPTPSSNASPWSEPAAVDVELTAYALLAQLTKPSLTQKEIAKATSIVAWLAKQHNAYGGFSS
TQDTVVALQALAKYATTAYMPSEEINLVVKSTENFQRTFNIQSVNRLVFQQDTLPNVPGMYTLEASGQGCVYV
QTVLRYNILPPTNMKTFSLSVEIGKARCEQPTSPRSLTLTIHTSYVGSRSSSNMAIVEVKMLSGFSPMEGTNQ
LLLQQPLVKKVEFGTDTLNIYLDELIKNTQTYTFTISQSVLVTNLKPATIKVYDYYLPDEQATIQYSDPCE

| | | |
|---|---|---|
| NOV7c, CG55051 | SEQ ID NO: 81 | 4492 bp |
| DNA Sequence | ORF Start: ATG at 1 | ORF Stop: TGA at 4375 |

ATGTGGGCTCAGCTCCTTCTAGGAATGTTGGCCCTATCACCAGCCATTGCAGAAGAACTTCCAAACTACCTGG
TGACATTACCAGCCCGGCTAAATTTCCCCTCCGTTCAGAAGGTTTGTTTGGACCTGAGCCCTGGGTACAGTGA
TGTTAAATTCACGGTTACTCTGGAGACCAAGGACAAGACCCAGAAGTTGCTAGAATACTCTGGACTGAAGAAG
AGGCACTTACATTGTATCTCCTTTCTTGTACCACCTCCTGCTGGTGGCACAGAAGAAGTGGCCACAATCCGGG
TGTCGGGAGTTGGAAATAACATCAGCTTTGAGGAGAAGAAAAAGGTTCTAATTCAGAGGCAGGGGAACGGCAC
CTTTGTACAGACTGACAAACCTCTCTACACCCCAGGGCAGCAAGTGTATTTCCGCATTGTCACCATGGATAGC
AACTTCGTTCCAGTGAATGACAAGTACTCCATGGTGGAACTACAGGATCCAAATAGCAACAGGATTGCACAGT
GGCTGGAAGTGGTACCTGAGCAAGGCATTGTAGACCTGTCCTTCCAACTGGCACCAGAGGCAATGCTGGGCAC
CTACACTGTGGCAGTGGCTGAGGGCAAGACCTTTGGTACTTTCAGTGTGGAGGAATATGTGCTTTCTCCATTT
CTCCTTTTACTCTCTTCAGTGCTGCCGAAGTTTAAGGTGGAAGTGGTGGAACCCAAGGAGTTATCAACGGTGC
AGGAATCTTTCTTAGTAAAAATTTGTTGTAGGTACACCTATGGAAAGCCCATGCTAGGGGCAGTGCAGGTATC
TGTGTGTCAGAAGGCAAATACTTACTGGTATCGAGAGGTGGAACGGGAACAGCTTCCTGACAAATGCAGGAAC
CTCTCTGGACAGACTGACAAAACAGGATGTTTCTCAGCACCTGTGGACATGGCCACCTTTGACCTCATTGGAT
ATGCGTACAGCCATCAAATCAATATTGTGGCTACTGTTGTGGAGGAAGGGACAGGTGTGGAGGCCAATGCCAC
TCAGAATATCTACAX₁TTCTCCACAAATGGGATCAATGACCTTTGAAGACACCAGCAATTTTTACCATCCAAA
TTTCCCCTTCAGTGGGAAGATGCTGCTCAAGTTTCCGCAAGGCGGTGTGCTCCCTTGCAAGAACCATCTAGTG
TTTCTGGTGATTTATGGCACAAATGGAACCTTCAACCAGACCCTGGTTACTGATAACAATGGCCTAGCTCCCT
TTACCTTGGAGACATCCGGTTGGAATGGGACAGACGTTTCTCTGGAGGGAAAGTTTCAAATGGAAGACTTAGT
ATATAATCCGGAACAAGTGCCACGTTACTACCAAAATGCCTACCTGCACCTGCGACCCTTCTACAGCACAACC
CGCAGCTTCCTTGGCATCCACCGGCTAAACGGCCCCTTGAAATGTGGCCAGCCCCAGGAAGTGCTGGTGGATT
ATTACATCGACCCGGCCGATGCAAGCCCTGACCAAGAGATCAGCTTCTCCTACTATTTAATAGGGAAAGGAAG
TTTGGTGATGGAGGGGCAGAAACACCTGAACTCTAAGAAGAAAGGACTGAAAGCCTCCTTCTCTCTCTCACTG
ACCTTCACTTCGAGACTGGCCCCTGATCCTTCCCTGGTGATCTATGCCATTTTTCCCAGTGGAGGTGTTGTAG
CTGACAAAATTCAGTTCTCAGTCGAGATGTGCTTTGACAATCAGCAGCTTCCAGGAGCAGAAGTGGAGCTGCA
GCTGCAGGCAGCTCCCGGATCCCTGTGTGCGCTCCGGGCGGTGGATGAGAGTGTCTTACTGCTTAGGCCAGAC
AGAGAGCTGAGCAACCGCTCTGTCTATGGGATGTTTCCATTCTGGTATGGTCACTACCCCTATCAAGTGGCTG
AGTATGATCAGTGTCCAGTGTCTGGCCCATGGGACTTTCCTCAGCCCCTCATTGACCCAATGCCCCAAGGGCA
TTCGAGCCAGCGTTCCATTATCTGGAGGCCCTCGTTCTCTGAAGGCACGGACCTTTTCAGCTTTTTCCGGGAC
GTGGGCCTGAAAATACTGTCCAATGCCAAAATCAAGAAGCCAGTAGATTGCAGTCACAGATCTCCAGAATACA
TCACTGCTATGGGTGGCGGTGGTCATCCAGAGGCTTTTGAGTCATCAACTCCTTTACATCAAGCAGAGGATTC
CAGGTCTCGCCAGTACTTCCCAGAGACCTGGCTCTGGGATCTGTTTCCTATTGGTAACTCGGGGAAGGAGGCG
TCCACGGTCACAGTTCCTGACGCCATCACCGAGTGGAAGGCGATGAGTTTCTGCACTTCCCAGTCAAGAGGCT
CGGGCTTTTCACCCACTGTTGGACTAACTGCTTTCAAGCCGTTCTTTGTTGACCTGACTCTCCCTTACTCAGT
GTCCGTAGGGGAATCCTTTCGTCTTACTGCCACCATCTTCAATTACCTAAAGGATTGCATCAGGGTTCAGACT
ACCTGGGCTAAATCGCATGAGTACCAGCTAGAATCATGGGCAGATTCTCAGACCTCCAGTTGTCTCTGTGCTG
TGACGCAAAAAACCCACCACTGGAACATCACAGCTGTCAAATTGGGTCACATTAACTTTACTATTAGTACAAA
ATTCTGGGACAGCAATGAACCATGTGGGGGCCAGAAGGGGTTTGTTCCCCAAAAGGGCCGAAGTGACACGCTC
TCAAGCACAGTTCTCGTCAAACCTGAGGGAGTCCTGGTGGAGAAGACACACAGCTCATTGCTGTGCCCAAAAG
AGGAAAGGGTGGCATCTGAATCTGTCTCCCTGGAGCTCCCAGTGGACATTGTTCCTGACTCGACCAAGGCTTA
GTTACGTGTTCTGGGAGACATTATGGGCACAGCCCTGCAGAACCTGGATGGTCTGGTGCAGATGCCCAGTGGC
GTGGCGTAGCAGAACATGGTCTTGTTTGCTCCCATCATCTATGTCTTGCAGTACCTGGAGAAGGCAGGGCTGC
GACGGATGGAGATCAGGTCTCGGGCAGTGGGTTTCCTGGAAATAGGGTACCAGAAGGAGCTGATGTACAAACA
AGCAACAGGCTCATACAGTGCCTTTGGGGAGCGAGATGGAAATGGAAACACATGGCTGACAGCGTTTGTCACA
AATGCATTTGGCCAAGCTCAGAAATTCATCTTCATTGATCCCAAGAACATCCAGGATGCTCTCAAGTGGATGG
AGGAACACCAGCTCCCCAGTGGCTGCTATGCCAACGTGGGAAATCTCCTTCACACAGCTATGAAGGGTGGTGT
GATGATTGAGGTCTCCTTGACTGCGTATGTCACAGCTGCATTGCTGGAGATGGGAAAGGATGTAGATGACCCA
TGGTGAAGTCAGGGTCTACGGTGTCTCAAGAATTCGGCCACCTCCACGACCAACCTCTACACACAGGCCCTGT
GGCTTTACATTTTCTCCCTGGCTGGGGAAATGGACATCAGAAACATTCTCCTTAAACAGTTAGATCAACAGGC
ATCATTCTCAGGAGAATCCATTTACTGGAGCCAGAAACCTACTCCATCATCGAACGCCAGCCCTTGGTCTGAG
CTGCGCGCTGTAGATGTGGAACTCACAGCATATGCATTGTTGGCCCAGCTTACCAAGCCCAGCCTGACTCAAA
GGAGAATAGCGAAGGCCACTAGCATAGTGGCTTGGTTGGCCAAGCAACACAATGCATATGGGGGCTTCTCTTC
ACTCATGGATACTGTAGTTGCTCTCCAAGCTCTTGCCAAATATGCCACTACCGCCTACATGCCATCTGAGGAG
TCAACACTGGTTGTAAAATCCACTGAGAATTTCCAGCGCACATTCAACATACAGTCAGTTAACAGATTGGTAT
TCAGCTAGGATACCCTGCCCAATGTCCCTGGAATGTACACGTTGGAGGCCTCAGGCCAGGGCTGTGTCTATGT
CAGACGGGTGTTGAGATACAATATTCTCCCTCCCACAAATATGAAGACCTTTAGTCTTAGTGTGGAAATAGGA
AAGCTAAGATGTGAGCAGCCGACTTCACCTCGATCCTTGACTCTCACTATTCACACCAGTTATGTGGGGAGCC
TAGCTGCTTCCAATATGGCTATTGTGGAAGTGAAGATGCTATCTGGGTTCAGTCCCATGGAGGGCACCAATCA
TTACTGTCTCCAGCAACCCCTGGTGAAGAAGGTTGAATTTGGAACTGACACACTTAACATTTACTTGGATGAG
TCATTCAAGAACACTCAGACTTACACCTTCACCATCAGCCAAAGTGTGCTGGTCACCAACTTGAAACCAGCAA
CCATCAAGGTCTATGACTACTACCTACCAGATGAACAGGCAACAATTCAGTATTCTGATCCCTGTGAATGAGG
ATAGGAGCTGGAAACTCAATTAGTCCTCTGTGACATTTACTGGAGGGTGGAACATTCTTCTGTCGCTTGAAGC
AGAACTCATTCAATCAAATAATTTAATTTCTCTGACTAGT
[Wherein residue X₁ is either T or C.]

| | | | |
|---|---|---|---|
| NOV7c, CG55051 | | | |
| Protein Sequence | SEQ ID NO: 82 | 1458 aa | MW at 161446.7kD |

MWAQLLLGMLALSPAIAEELPNYLVTLPARLNFPSVQKVCLDLSPGYSDVKFTVTLETKDKTQKLLEYSGLKK
RHLHCISFLVPPPAGGTEEVATIRVSGVGNNISFEEKKKVLIQRQGNGTFVQTDKPLYTPGQQVYFRIVTMDS
NFVPVNDKYSMVELQDPNSNRIAQWLEVVPEQGIVDLSFQLAPEAMLGTYTVAVAEGKTFGTFSVEEYVLSPF
LLLLSSVLPKFKVEVVEPKELSTVQESFLVKICCRYTYGKPMLGAVQVSVCQKANTYWYREVEREQLPDKCRN
LSGQTDKTGCFSAPVDMATFDLIGYAYSHQINIVATVVEEGTGVEANATQNIYZ₁SPQMGSMTFEDTSNFYHP
FPFSGKNMLLKFPQGGVLPCKNHLVFLVIYGTNGTFNQTLVTDNNGLAPFTLETSGWNGTDVSLEGKFQMEDL
YNPEQVVPRYYQNAYLHLRPFYSTTRSFLGIHRLNGPLKCGQPQEVLVDYYIDPADASPDQEISFSYYLIGKG
LVMEGQSKHLNSKKKGLKASFSLSLTFTSRLAPDPSLVIYAIFPSGGVVADKIQFSVEMCFDNQQLPGAEVEL
LQAAPGQSLCALRAVDESVLLLRPDRELSMRSVYGMFPFWYGHYPYQVAEYDQCPVSGPWDFPQPLIDPMPQG
SSQRSIHIWRPSFSEGTDLFSFFRDVGLKILSNAKIKKPVDCSHRSPEYSTAMGGGGHPEAFESSTPLHQAED
QVRQYFSPETWLWDLFPIGNSGKEAVHVTVPDAITEWKAMSFCTSQSRGFGLSPTVGLTAFKPFFVDLTLPYS
VRGESFVRLTATIFNYLKDCIRVQTDLAKSHEYQLESWADSQTSSCLCADDAKTHHWNITAVKLGHINFTIST
ILDSNEKPCGGQKGFVPQKGRSDTLIKPVLVKPEGVLVEKTHSSLLCPKGGKVASESVSLELPVDIVPDSTKA
VTVLGDYIMGTALQNLDGLVQMPSGCGEQNMVLFAPIIYVLQYLEKAGLLTEEIRSPAVGFLEIGYQKELMYK
SNGSYSHAFGERDGNGNTWLTAFVTKCFGQAQKFIFIDPKNIQDALKWMAGNQLPSGCYANVGNLLHTAMKGG
DDEVSLVTAYVTAALLEMGKDVDDPMVSQGLRCLKNSATSTTNLYTQAILAYIFSLAGEMDIRNILLKQLDQQ
IISGESAIYWSQKPTPSSNASPWSEPAAVDVELTAYALLAQLTKPSLTQKEIAKATSIVAWLAKQHNAYGGFS
TQDTVVSALQALAKYATTAYMPSEEINLVVKSTENFQRTFNIQSVNRLVFQQDTLPNVPGMYTLEASGQGCVY
QTVLRYVNILPPTNMKTFSLSVEIGKARCEQPTSPRSLTLTIHTSYVGSRSSSNMAIVEVKMLSGFSPMEGTN
LLLQQPQLVKKVEFGTDTLNIYLDELIKNTQTYTFTISQSVLVTNLKPATIKVYDYYLPDEQATIQYSDPCE
[Wherein residue Z₁ is I or T.]

[0331] Further analysis of the NOV7a protein yielded the following properties shown in Table7C.

TABLE 7C
Protein Sequence Properties NOV7a

| SignalP | No Known Signal Sequence Predicted | | | |
|---|---|---|---|---|
| analysis: | | | | |
| PSORT II | Psort II Results (see Details): | | | |
| analysis: | 52.2%: cytoplasmic | | | |
| | 26.1%: nuclear | | | |
| | 21.7%: mitochondrial | | | |
| | Details of Psort Prediction | | | |
| | >>> MUS belongs to the animal class | | | |
| | *** Reasoning Step: 2 | | | |
| | SRCFLG: 1 | | | |
| | Prelim. Calc. of ALOM (thresh: 0.5) count: 0 | | | |
| | McG: Length of UR: 10 | | | |
| | Peak Value of UR: 1.33 | | | |
| | Net Charge of CR: −2 | | | |
| | McG: Discrim Score: −7.23 | | | |
| | GvH: Signal Score (−3.5): −3.9 | | | |
| | Possible site: 31 | | | |
| | >>> Seems to have no N-terminal signal seq. | | | |
| | Amino Acid Composition: calculated from 1 | | | |
| | new cnt: 0 ** thrshld changed to −2 | | | |
| | involving clv. sig in the ALOMREC or not: 0B | | | |
| | ALOM program count: 0 value: 1.32 threshold: −2.0 | | | |
| | PERIPHERAL Likelihood = 1.32 | | | |
| | modified ALOM score: −1.16 | | | |
| | Gavel: Bound. Mitoch. Preseq. R-2 motif: 1 | | | |
| | mtdisc (mit) Status: negative (−3.22) | | | |
| | *** Reasoning Step: 3 | | | |
| | KDEL Count: 0 | | | |
| | Goal mtmx modified Score: 0.10 | | | |
| | SKL motif: pos: 509(596), count: 2 SRL | | | |
| | pox modified by SKL scr: 0.3 | | | |
| | Poxaac Score: 0.32 | | | |
| | >>> POX Status: notclr | | | |
| | pox modified by aac scr: 0.110 | | | |
| | >>> lys: 0.07 Status: notclr | | | |
| | Goal lys: modified. Score: 0.157 | | | |
| | Nuc-4 pos: 54 (3) KKRH | | | |
| | nuc modified. Score: 0.60 | | | |
| | >>> Nuclear Signal. Status: notclr (0.30) | | | |
| | Details of Psort II Prediction | | | |
| | *** Warning: 1st aa is not methyonine | | | |
| | PSG: a new signal peptide prediction method | | | |
| | N-region: length 2; pos. chg 0; neg. chg 2 | | | |
| | H-region: length 10; peak value 0.00 | | | |
| | PSG score: −4.40 | | | |
| | GvH: von Heijne's method for signal seq. recognition | | | |
| | GvH score (threshold: −2.1): −7.90 | | | |
| | possible cleavage site: between 31 and 32 | | | |
| | >>> Seems to have no N-terminal signal peptide | | | |
| | ALOM: Klein et al's method for TM region allocation | | | |
| | Init position for calculation: 1 | | | |
| | Tentative number of TMS(s) for the threshold 0.5: 0 | | | |
| | number of TMS(s) . . . fixed | | | |
| | PERIPHERAL Likelihood = 1.32 (at 517) | | | |
| | ALOM score: 1.32 (number of TMSs: 0) | | | |
| | MITDISC: discrimination of mitochondrial targeting seq | | | |
| | R content: | 1 | Hyd Moment(75): | 9.53 |
| | Hyd Moment(95): | 10.99 | G content: | 0 |
| | D/E content: | 3 | S/T content: | 2 |

Score: −6.53
Gavel: prediction of cleavage sites for mitochondrial preseq
cleavage site motif not found
NUCDISC: discrimination of nuclear localization signals
pat4: KKRH (3) at 55
pat7: none
bipartite: none
content of basic residues: 8.9%
NLS Score: −0.29
NNCN: Reinhardt's method for Cytplasmic/Nuclear discrimination
Prediction: cytoplasmic
Reliability: 89

[0332] A search of the NOV7a protein against the Geneseq database, a proprietary database that contains sequences published in patents and patent publication, yielded several homologous proteins shown in Table 7C.

TABLE 7C
GENESEQ RESULTS FOR NOV7a

| | | NOV7a | | |
|---|---|---|---|---|
| | | Residues/ | Identities/ | |
| Geneseq | Protein/Organism/Length [Patent #, | Match | Similarities for the | Expect |
| Identifier | Date] | Residues | Matched Region | Value |
| AAG63549 | A human alpha-2 macroglobulin-like | 1 . . . 596 | 595/596 (99%) | 0.0 |
| | polypeptide - Homo sapiens, 912 aa. | 31 . . . 623 | 595/596 (99%) | |
| AAG63550 | A human alpha-2 macroglobulin-like | 1 . . . 596 | 595/596 (99%) | 0.0 |
| | polypeptide variant - Homo sapiens, | 18 . . . 613 | 595/596 (99%) | |
| | 899 aa. | | | |
| AAG63551 | A human alpha-2 macroglobulin-like | 1 . . . 596 | 595/596 (99%) | 0.0 |
| | polypeptide - Homo sapiens, 882 aa. | 1 . . . 596 | 595/596 (99%) | |

[0333] In a BLAST search of public sequence databases, the NOV7a protein was found to have homology to the proteins shown in the BLASTP data in Table 7D.

TABLE 7D
Public BLASTP Results for NOV7a

| | | NOV7a | Identities/ | |
|---|---|---|---|---|
| Protein | | Residues/ | Similarities for | |
| Accession | | Match | the Matched | Expect |
| Number | Protein/Organism/Length | Residues | Portion | Value |
| CAD48670 | Sequence 1 from Patent | 1 . . . 596 | 576/600 (96%) | 0.0 |
| | WO0229058 - Homo sapiens | 18 . . . 617 | 579/600 (96%) | |
| | (Human), 1492 aa. | | | |
| P01023 | Alpha-2-macroglobulin precursor | 4 . . . 596 | 207/593 (34%) | 0.0 |
| | (Alpha-2-M) - Homo sapiens | 29 . . . 619 | 324/593 (54%) | |
| | (Human), 1474 aa | | | |
| CAA01533 | ALPHA 2-MACROGLOBULIN | 4 . . . 596 | 207/593 (34%) | 0.0 |
| | 690-740 - Homo sapiens (Human), | 29 . . . 619 | 324/593 (54%) | |
| | 1484 aa | | | |

[0334] PFam analysis predicts that the NOV7a protein contains the domains shown in the Table 7F. Specific amino acid residues of NOV7a for each domain is shown in column 2, equivalent domains in the other NOV7 proteins of the invention are also encompassed herein.

TABLE 7F
Domain Analysis of NOV7a

| | NOV7a Match Region | | |
|---|---|---|---|
| Pfam Domain | Amino acid residues | Score | Expect Value |
| A2M_N | 1 . . . 596 | 278.3 | 1e−79 |

### Example 8

### NOV8, CG55060, Antileukoproteinase 1

[0335] The NOV8 family of novel nucleic acids and polypeptides clones includes NOV8a through NOV8g, SEQ ID Nos: 83-96, and the nucleotide and encoded polypeptide sequences are shown in Table 8A. In a particular embodiment NOV8 nucleic acid sequence is SEQ ID NO:95, wherein each of residues X₁, X₂, X₃, X₄, and X₅, is either T or C. Nucleic acid sequence SEQ ID NO:95 encodes polypeptide SEQ ID NO:96, wherein each of residues Z₁ is F or S; Z₂ is L or P; Z₃ is C or R; Z₄ is L or S; and Z₅ is C or R. Equivalent nucleic acid and polypeptide substitutions apply to other NOV8 sequences as would be appreciated by one of skill in the art, and are emcompassed in the present invention.

TABLE 8A
NOV8 Sequence Analysis

| | | |
|---|---|---|
| NOV8a, CG55060-04 | SEQ ID NO: 83 | 24 bp |
| DNA Sequence | ORF Start: at 1 | ORF Stop: TAG at 322 |

TCTGGAAAGTCCTTCAAAGCTGGAGTCTGTCCTCCTAAGAAATCTGCCCAGTGCCTTAGATACAAGAAACCTG
AGTGCCAGAGTGACTGGCAGTGTCCAGGGAAGAAGAGATGTTGTCCTGACACTTGTGGCATCAAATGCCTGGA
TCCTGTTGACACCCCAAACCCAACAAGGAGGAAGCCTGGGAAGTACCCAGTGACTTATGGCCAATGTTTGATG
CTTAACCCCCCCAATTTCTGTGAGATGGATGGCCAGTGCAAGCGTGACTTGAAGTGTTGCATGGGCATGTGTG
GGAAATCCTGCGTTTCCCCTGTGAAAGCTTAG

| | | | |
|---|---|---|---|
| NOV8a, CG55060-04 | | | |
| Protein Sequence | SEQ ID NO: 84 | 107 aa | MW at 11785.9kD |

SGKSFKAGVCPPKKSAQCLRYKKPECQSDWQCPGKKRCCPDTCGIKCLDPVDTPNPTRRKPGKYPVTYGQCLM
LNPPNFCEMDGQCKRDLKCCMGMCGKSCVSPVKA

| | | |
|---|---|---|
| NOV8b, SNP 13374945 | SEQ ID NO: 85 | 594 bp |
| DNA Sequence | ORF Start: ATG at 19 | ORF Stop: TGA at 415 |

GTCACTCCTGCCTTCACCATGAAGTCCAGCGGCCTCTCCCCCTTCCTGGTGCTGCTTGCCCTGGGAACTCTGG
CACCTTGGGCTGTGGAAGGCTCTGGAAAGTCCTTCAAAGCTGGAGTCTGTCCTCCTAAGAAATCTGCCCAGTG
CCTTAGATACAAGAAACCTGAGTGCCAGAGTGACTGGCAGTGTCCAGGGAAGAAGAGATGTTGTCCTGACACT
TGTGGCATCAAATGCCTGGATCCTGTTGACACCCCAAACCCAACAAGGAGGAAGCCTGGGAAGTGCCCAGTGA
CTTATGGCCAATGTTTGATGCTTAACCCCCCCAATTTCTGTGAGATGGATGGCCAGTGCAAGCGTGACTTGAA
GTGTTGCATGGGCATGTGTGGGAAATCCTGCGTTTCCCCTGTGAAAGCTTGATTCCTGCCATATGGAGGAGGC
TCTGGAGTCCTGCTCTGTGTGGTCCAGGTCCTTTCCACCCTGAGACTTGGCTCCACCACTGATATCCTCCTTT
GGGGAAAGGCTTGGCACACAGCAGGCTTTCAAGAAGTGCCAGTTGATCAATGAATAAATAAACGAGCCTATTT
CTCTTTGCAC

| | | | |
|---|---|---|---|
| NOV8b, SNP 13374945 | | | |
| Protein Sequence | SEQ ID NO: 86 | 132 aa | MW at 14265.8kD |

MKSSGLSPFLVLLALGTLAPWAVEGSGKSFKAGVCPPKKSAQCLRYKKPECQSDWQCPGKKRCCPDTCGIKCL
DPVDTPNPTRRKPGKCPVTYGQCLMLNPPNFCEMDGQCKRDLKCCMGMCGKSCVSPVKA

| | | |
|---|---|---|
| NOV8c, SNP 13376226 | SEQ ID NO: 87 | 594 bp |
| DNA Sequence | ORF Start: ATG at 19 | ORF Stop: TGA at 415 |

GTCACTCCTGCCTTCACCATGAAGTCCAGCGGCCTCTTCCCCTTCCTGGTGCTGCTTGCCCTGGGAACTCTGG
CACCTTGGGCTGTGGAAGGCTCTGGAAAGTCCTTCAAAGCTGGAGTCTGTCCTCCTAAGAAATCTGCCCAGTG
CCTTAGATACAAGAAACCTGAGCGCCAGAGTGACTGGCAGTGTCCAGGGAAGAAGAGATGTTGTCCTGACACT
TGTGGCATCAAATGCCTGGATCCTGTTGACACCCCAAACCCAACAAGGAGGAAGCCTGGGAAGTGCCCAGTGA
CTTATGGCCAATGTTTGATGCTTAACCCCCCCAATTTCTGTGAGATGGATGGCCAGTGCAAGCGTGACTTGAA
GTGTTGCATGGGCATGTGTGGGAAATCCTGCGTTTCCCCTGTGAAAGCTTGATTCCTGCCATATGGAGGAGGC
TCTGGAGTCCTGCTCTGTGTGGTCCAGGTCCTTTCCACCCTGAGACTTGGCTCCACCACTGATATCCTCCTTT
GGGGAAAGGCTTGGCACACAGCAGGCTTTCAAGAAGTGCCAGTTGATCAATGAATAAATAAACGAGCCTATTT
CTCTTTGCAC

| | | | |
|---|---|---|---|
| NOV8c, SNP 13376226 | | | |
| Protein Sequence | SEQ ID NO: 88 | 132 aa | MW at 14379.0kD |

MKSSGLFPFLVLLALGTLAPWAVEGSGKSFKAGVCPPKKSAQCLRYKKPERQSDWQCPGKKRCCPDTCGIKCL
DPVDTPNPTRRKPGKCPVTYGQCLMLNPPNFCEMDGQCKRDLKCCMGMCGKSCVSPVKA

| | | |
|---|---|---|
| NOV8d, SNP 13377692 | SEQ ID NO: 89 | 594 |
| DNA Sequence | ORF Start: ATG at 19 | ORF Stop: TGA at 415 |

GTCACTCCTGCCTTCACCATGAAGTCCAGCGGCCTCTTCCCCTTCCTGGTGCCGCTTGCCCTGGGAACTCTGG
CACCTTGGGCTGTGGAAGGCTCTGGAAAGTCCTTCAAAGCTGGAGTCTGTCCTCCTAAGAAATCTGCCCAGTG
CCTTAGATACAAGAAACCTGAGTGCCAGAGTGACTGGCAGTGTCCAGGGAAGAAGAGATGTTGTCCTGACACT
TGTGGCATCAAATGCCTGGATCCTGTTGACACCCCAAACCCAACAAGGAGGAAGCCTGGGAAGTGCCCAGTGA
CTTATGGCCAATGTTTGATGCTTAACCCCCCCAATTTCTGTGAGATGGATGGCCAGTGCAAGCGTGACTTGAA
GTGTTGCATGGGCATGTGTGGGAAATCCTGCGTTTCCCCTGTGAAAGCTTGATTCCTGCCATATGGAGGAGGC
TCTGGAGTCCTGCTCTGTGTGGTCCAGGTCCTTTCCACCCTGAGACTTGGCTCCACCACTGATATCCTCCTTT
GGGGAAAGGCTTGGCACACAGCAGGCTTTCAAGAAGTGCCAGTTGATCAATGAATAAATAAACGAGCCTATTT
CTCTTTGCAC

| | | | |
|---|---|---|---|
| NOV8d, SNP 13377692 | | | |
| Protein Sequence | SEQ ID NO: 90 | 132 aa | MW at 14309.9kD |

MKSSGLFPFLVPLALGTLAPWAVEGSGKSFKAGVCPPKKSAQCLRYKKPECQSDWQCPGKKRCCPDTCGIKCL
DPVDTPNPTRRKPGKCPVTYGQCLMLNPPNFCEMDGQCKRDLKCCMGMCGKSCVSPVKA

| | | |
|---|---|---|
| NOV8e, SNP 13378858 | SEQ ID NO: 91 | 594 bp |
| DNA Sequence | ORF Start: ATG at 19 | ORF Stop: TGA at 415 |

GTCACTCCTGCCTTCACCATGAAGTCCAGCGGCCTCTTCCCCTTCCTGGTGCTGCTTGCCCTGGGAACTCTGG
CACCTTGGGCTGTGGAAGGCTCTGGAAAGTCCTTCAAAGCTGGAGTCTGTCCTCCTAAGAAATCTGCCCAGTG
CCTTAGATACAAGAAACCTGAGTGCCAGAGTGACTGGCAGTGTCCAGGGAAGAAGAGATGTTGTCCTGACACT
TGTGGCATCAAATGCCTGGATCCTGTTGACACCCCAAACCCAACAAGGAGGAAGCCTGGGAAGTGCCCAGTGA
CTTATGGCCAATGTTCGATGCTTAACCCCCCCAATTTCTGTGAGATGGATGGCCAGTGCAAGCGTGACTTGAA
GTGTTGCATGGGCATGTGTGGGAAATCCTGCGTTTCCCCTGTGAAAGCTTGATTCCTGCCATATGGAGGAGGC
TCTGGAGTCCTGCTCTGTGTGGTCCAGGTCCTTTCCACCCTGAGACTTGGCTCCACCACTGATATCCTCCTTT
GGGGAAAGGCTTGGCACACAGCAGGCTTTCAAGAAGTGCCAGTTGATCAATGAATAAATAAACGAGCCTATTT
CTCTTTGCAC

| | | | |
|---|---|---|---|
| NOV8e, SNP 13378858 | | | |
| Protein Sequence | SEQ ID NO: 92 | 132 aa | MW at 14299.8kD |

MKSSGLFPFLVLLALGTLAPWAVEGSGKSFKAGVCPPKKSAQCLRYKKPECQSDWQCPGKKRCCPDTCGIKCL
DPVDTPNPTRRKPGKCPVTYGQCSMLNPPNFCEMDGQCKRDLKCCMGMCGKSCVSPVKA

| | | |
|---|---|---|
| NOV8f, SNP 13378859 | SEQ ID NO: 93 | 594 bp |
| DNA Sequence | ORF Start: ATG at 19 | ORF Stop: TGA at 415 |

GTCACTCCTGCCTTCACCATGAAGTCCAGCGGCCTCTTCCCCTTCCTGGTGCTGCTTGCCCTGGGAACTCTGG
CACCTTGGGCTGTGGAAGGCTCTGGAAAGTCCTTCAAAGCTGGAGTCTGTCCTCCTAAGAAATCTGCCCAGTG
CCTTAGATACAAGAAACCTGAGTGCCAGAGTGACTGGCAGTGTCCAGGGAAGAAGAGATGTTGTCCTGACACT
TGTGGCATCAAATGCCTGGATCCTGTTGACACCCCAAACCCAACAAGGAGGAAGCCTGGGAAGTGCCCAGTGA
CTTATGGCCAATGTTTGATGCTTAACCCCCCCAATTTCTGTGAGATGGATGGCCAGTGCAAGCGTGACTTGAA
GTGTTGCATGGGCATGTGTGGGAAATCCCGCGTTTCCCCTGTGAAAGCTTGATTCCTGCCATATGGAGGAGGC
TCTGGAGTCCTGCTCTGTGTGGTCCAGGTCCTTTCCACCCTGAGACTTGGCTCCACCACTGATATCCTCCTTT
GGGGAAAGGCTTGGCACACAGCAGGCTTTCAAGAAGTGCCAGTTGATCAATGAATAAATAAACGAGCCTATTT
CTCTTTGCAC

| | | | |
|---|---|---|---|
| NOV8f, SNP 13378859 | | | |
| Protein Sequence | SEQ ID NO: 94 | 132 aa | MW at 14379.0kD |

MKSSGLFPFLVLLALGTLAPWAVEGSGKSFKAGVCPPKKSAQCLRYKKPECQSDWQCPGKKRCCPDTCGIKCL
DPVDTPNPTRRKPGKCPVTYGQCLMLNPPNFCEMDGQCKRDLKCCMGMCGKSRVSPVKA

| | | |
|---|---|---|
| NOV8g, CG55060 | SEQ ID NO: 95 | 594 bp |
| DNA Sequence | ORF Start: ATG at 19 | ORF Stop: TGA at 415 |

GTCACTCCTGCCTTCACCATGAAGTCCAGCGGCCTCTX₁CCCCTTCCTGGTGCX₂GCTTGCCCTGGGAACTCT
GGCACCTTGGGCTGTGGAAGGCTCTGGAAAGTCCTTCAAAGCTGGAGTCTGTCCTCCTAAGAAATCTGCCCAG
TGCCTTAGATACAAGAAACCTGAGX₃GCCAGAGTGACTGGCAGTGTCCAGGGAAGAAGAGATGTTGTCCTGAC
ACTTGTGGCATCAAATGCCTGGATCCTGTTGACACCCCAAACCCAACAAGGAGGAAGCCTGGGAAGTGCCCAG
TGACTTATGGCCAATGTTX₄GATGCTTAACCCCCCCAATTTCTGTGAGATGGATGGCCAGTGCAAGCGTGACT
TGAAGTGTTGCATGGGCATGTGTGGGAAATCCX₅GCGTTTCCCCTGTGAAAGCTTGATTCCTGCCATATGGAG
GAGGCTCTGGAGTCCTGCTCTGTGTGGTCCAGGTCCTTTCCACCCTGAGACTTGGCTCCACCACTGATATCCT
CCTTTGGGGAAAGGCTTGGCACACAGCAGGCTTTCAAGAAGTGCCAGTTGATCAATGAATAAATAAACGAGCC
TATTTCTCTTTGCAC

[Wherein each of residues X₁, X₂, X₃, X4_{,}and X₅, is either T or C.]

| | | | |
|---|---|---|---|
| NOV8g, CG55060 | | | |
| Protein Sequence | SEQ ID NO: 96 | 132 aa | MW at 14325.9kD |

MKSSGLZ₁PFLVZ₂LALGTLAPWAVEGSGKSFKAGVCPPKKSAQCLRYKKPEZ₃QSDWQCPGKKRCCPDTCGI
KCLDPVDTPNPTRRKPGKCPVTYGQCZ₄MLNPPNFCEMDGQCKRDLKCCMGMCGKSZ₅VSPVKA
[Wherein residue Z₁ is F or S; Z₂ is L or P; Z₃ is C or R; Z₄ is L or S;
and Z₅ is C or R.]

[0336] Further analysis of the NOV8a protein yielded the following properties shown in Table8C.

TABLE 8C
Protein Sequence Properties NOV8a

| SignalP | No Known Signal Sequence Predicted | | | |
|---|---|---|---|---|
| analysis: | | | | |
| PSORT II | Psort Results (see Details): | | | |
| analysis: | 88.0%: nucleus | | | |
| | 10.0%: mitochondrial matrix space | | | |
| | 10.0%: lysosome (lumen) | | | |
| | 0.0%: endoplasmic reticulum (membrane) | | | |
| | Psort II Results (see Details): | | | |
| | 87.0%: nuclear | | | |
| | 13.0%: mitochondrial | | | |
| | Details of Psort Prediction | | | |
| | >>> MUS belongs to the animal class | | | |
| | *** Reasoning Step: 2 | | | |
| | SRCFLG: 1 | | | |
| | Prelim. Calc. of ALOM (thresh: 0.5) count: 0 | | | |
| | McG: Length of UR: 6 | | | |
| | Peak Value of UR: −0.36 | | | |
| | Net Charge of CR: 2 | | | |
| | McG: Discrim Score: −17.57 | | | |
| | GvH: Signal Score (−3.5): −7.95 | | | |
| | Possible site: 53 | | | |
| | >>> Seems to have no N-terminal signal seq. | | | |
| | Amino Acid Composition: calculated from 1 | | | |
| | new cnt: 0 ** thrshld changed to −2 | | | |
| | involving clv. sig in the ALOMREC or not: 0B | | | |
| | ALOM program count: 0 value: 8.59 threshold: −2.0 | | | |
| | PERIPHERAL Likelihood = 8.59 | | | |
| | modified ALOM score: −2.62 | | | |
| | Gavel: Bound. Mitoch. Preseq. R-2 motif: 22 LRYKKP | | | |
| | mtdisc (mit) Status: negative (−2.26) | | | |
| | *** Reasoning Step: 3 | | | |
| | KDEL Count: 0 | | | |
| | Goal mtmx modified Score: 0.10 | | | |
| | SKL motif: pos: −1(107), count: 0 | | | |
| | Poxaac Score: −11.55 | | | |
| | >>> POX Status: negative | | | |
| | >>> lys: −6.99 Status: negative | | | |
| | Goal lys: modified. Score: 0.100 | | | |
| | Nuc-4 pos: 57 (4) RRKP | | | |
| | Robbins & Dingwall pos: 21 (3) KK PECQSDWQCP GKKRC | | | |
| | nuc mod by robbins. Score: 0.60 | | | |
| | nuc modified. Score: 0.90 | | | |
| | >>> Nuclear Signal. Status: positive (0.70) | | | |
| | Details of Psort II Prediction | | | |
| | *** Warning: 1st aa is not methyonine | | | |
| | PSG: a new signal peptide prediction method | | | |
| | N-region: length 6; pos.chg 2; neg.chg 0 | | | |
| | H-region: length 6; peak value −5.62 | | | |
| | PSG score: −10.02 | | | |
| | GvH: von Heijne's method for signal seq. recognition | | | |
| | GvH score (threshold: −2.1): −11.95 | | | |
| | possible cleavage site: between 53 and 54 | | | |
| | >>> Seems to have no N-terminal signal peptide | | | |
| | ALOM: Klein et al's method for TM region allocation | | | |
| | Init position for calculation: 1 | | | |
| | Tentative number of TMS(s) for the threshold 0.5: 0 | | | |
| | number of TMS(s) . . . fixed | | | |
| | PERIPHERAL Likelihood = 8.59 (at 89) | | | |
| | ALOM score: 8.59 (number of TMSs: 0) | | | |
| | MITDISC: discrimination of mitochondrial targeting seq | | | |
| | R content: | 1 | Hyd Moment(75): | 3.92 |
| | Hyd Moment(95): | 8.87 | G content: | 2 |
| | D/E content: | 1 | S/T content: | 3 |

Score: −4.11
Gavel: prediction of cleavage sites for mitochondrial preseq
R-2 motif at 30 LRY|KK
NUCDISC: discrimination of nuclear localization signals
pat4: RRKP (4) at 58
pat7: PGKKRCC (5) at 33
pat7: PNPTRRK (3) at 54
pat7: PTRRKPG (5) at 56
bipartite: KKPECQSDWQCPGKKRC at 22
content of basic residues: 18.7%
NLS Score: 1.39
ER Membrane Retention Signals:
KKXX-like motif in the C-terminus: SPVK
NNCN: Reinhardt's method for Cytplasmic/Nuclear discrimination
Prediction: nuclear
Reliability: 94.1

[0337] A search of the NOV8a protein against the Geneseq database, a proprietary database that contains sequences published in patents and patent publication, yielded several homologous proteins shown in Table 8C

TABLE 8C
GENESEQ RESULTS FOR NOV8a

| | | NOV8a | Identities/ | |
|---|---|---|---|---|
| | | Residues/ | Similarities for | |
| Geneseq | Protein/Organism/Length [Patent #, | Match | the Matched | Expect |
| Identifier | Date] | Residues | Region | Value |
| AAU99884 | rSLAP1 fusion protein - Homo sapiens, 503 | 1 . . . 107 | 106/107 (99%) | 0.0 |
| | aa. | 397 . . . 503 | 106/107 (99%) | |
| AAP60562 | Synthetic protein capable of directing | 1 . . . 107 | 106/107 (99%) | 0.0 |
| | microbial synthesis of a serine protease | 1 . . . 107 | 106/107 (99%) | |
| | inhibitor having similar properties to protein | | | |
| | isolated from parotid secretions - Synthetic, | | | |
| | 107 aa. | | | |
| AAP60563 | Synthetic sequence capable of directing | 1 . . . 107 | 106/107 (99%) | 0.0 |
| | microbial synthesis of a secretory | 1 . . . 107 | 106/107 (99%) | |
| | leukocyte protease-inhibitor - Synthetic, | | | |
| | 107 aa | | | |
| AAP70584 | Sequence of protein with the biological | 1 . . . 107 | 106/107 (99%) | 0.0 |
| | activity of HUSI (human seminal plasma | 26 . . . 132 | 106/107 (99%) | |
| | inhibitor) type I inhibitors encoded on pRH | | | |
| | 34 - Homo sapiens, 132 aa. | | | |
| AAP90384 | Human polymorphonuclear leukocyte | 1 . . . 107 | 106/107 (99%) | 0.0 |
| | elastase inhibiting protein - Homo sapiens, | 1 . . . 107 | 106/107 (99%) | |
| | 107 aa. | | | |

[0338] In a BLAST search of public sequence databases, the NOV8a protein was found to have homology to the proteins shown in the BLASTP data in Table 8D.

TABLE 8D
Public BLASTP Results for NOV8a

| | | NOV8a | Identities/ | |
|---|---|---|---|---|
| Protein | | Residues/ | Similarities for | |
| Accession | | Match | the Matched | Expect |
| Number | Protein/Organism/Length | Residues | Portion | Value |
| P03973 | Sequence 1 from Patent | 1 . . . 107 | 106/107 (99%) | 0.0 |
| | WO0229058 - Homo sapiens | 26 . . . 132 | 106/107 (99%) | |
| | (Human), 1492 aa. | | | |
| CAA00747 | ALP-242 PROTEIN - synthetic | 1 . . . 107 | 105/107 (98%) | 0.0 |
| | construct, 107 aa (fragment). | 1 . . . 107 | 106/107 (99%) | |
| CAA00742 | ALP-240 PROTEIN - synthetic | 1 . . . 107 | 104/107 (97%) | 0.0 |
| | construct, 107 aa (fragment). | 1 . . . 107 | 105/107 (98%) | |

[0339] PFam analysis does not predict any domains for the NOV8a protein. Pfam does predict that the NOV8a protein contains the domains shown below in the Table 8F. Specific amino acid residues of NOV8a for each domain is shown in column 2, equivalent domains in the other NOV8 proteins of the invention are also encompassed herein.

TABLE 8F
Domain Analysis of NOV8a

| | | Identities/ | |
|---|---|---|---|
| | | Similarities | |
| | NOV8a Match Region | for the | Expect |
| Pfam Domain | Amino Acid Residues: | Matched Region | Value |
| wap | 6 . . . 50 | 20/49 (41%) | 1.1e−13 |
| | | 41/49 (84%) | |
| wap | 60 . . . 104 | 20/49 (41%) | 2.2e−11 |
| | | 35/49 (71%) | |

### Example 9

### NOV9, CG56008, LIV-1 Protein

[0340] The NOV9 family of novel nucleic acids and polypeptides clones includes NOV9a through NOV9i, SEQ ID NOs: 97-114, and the nucleotide and encoded polypeptide sequences are shown in Table 9A. In a particular embodiment NOV9 nucleic acid sequence is SEQ ID NO:113, wherein residue X₁ is T or C. Nucleic acid sequence SEQ ID NO:113 encodes polypeptide SEQ ID NO:114, wherein residue Z₁ is L or P. Equivalent nucleic acid and polypeptide substitutions apply to other NOV9 sequences as would be appreciated by one of skill in the art, and are emcompassed in the present invention.

TABLE 9A
NOV9 Sequence Analysis

| | | |
|---|---|---|
| NOV9a, CG56008-01 | SEQ ID NO: 97 | 3445 bp |
| DNA Sequence | ORF Start: ATG at 117 | ORF Stop: TAG at 2382 |

CACCGCGTGTTCGCGCCTGGTAGAGATTTCTCGAAGACACCAGTGGGCCCGTGTGGAACCAAACCTGCGCGCG
TGGCCGGGCCGTGGGACAACGAGGCCGCGGAGACGAAGGCGCAATGGCGAGGAAGTTATCTGTAATCTTGATC
CTGACCTTTGCCCTCTCTGTCACAAATCCCCTTCATGAACTAAAAGCAGCTGCTTTCCCCCAGACCACTGAGA
AAATTAGTCCGAATTGGGAATCTGGCATTAATGTTGACTTGGCAATTTCCACACGGCAATATCATCTACAACA
GCTTTTCTACCGCTATGGAGAAAATAATTCTTTGTCAGTTGAAGGGTTCAGAAAATTACTTCAAAATATAGGC
ATAGATAAGATTAAAAGAATCCATATACACCATGACCACGACCATCACTCAGACCACGAGCATCACTCAGACC
ATGAGCGTCACTCAGACCATGAGCATCACTCAGAGCACGAGCATCACTCTGACCATGATCATCACTCTCACCA
TAATCATGCTGCTTCTGGTAAAAATAAGCGAAAAGCTCTTTGCCCAGACCATGACTCAGATAGTTCAGGTAAA
GATCCTAGAAACAGCCAGGGGAAAGGAGCTCACCGACCAGAACATGCCAGTGGTAGAAGGAATGTCAAGGACA
GTGTTAGTGCTAGTGAAGTGACCTCAACTGTGTACAACACTGTCTCTGAAGGAACTCACTTTCTAGAGACAAT
AGAGACTCCAAGACCTGGAAAACTCTTCCCCAAAGATGTAAGCAGCTCCACTCCACCCAGTGTCACATCAAAG
AGCCGGGTGAGCCGGCTGGCTGGTAGGAAAACAAATGAATCTGTGAGTGAGCCCCGAAAAGGCTTTATGTATT
CCAGAAACACAAATGAAAATCCTCAGGAGTGTTTCAATGCATCAAAGCTACTGACATCTCATGGCATGGGCAT
CCAGGTTCCGCTGAATGCAACAGAGTTCAACTATCTCTGTCCAGCCATCATCAACCAAATTGATGCTAGATCT
TGTCTGATTCATACAAGTGAAAAGAAGGCTGAAATCCCTCCAAAGACCTATTCATTACAAATAGCCTGGGTTG
GTGGTTTTATAGCCATTTCCATCATCAGTTTCCTGTCTCTGCTGGGGGTTATCTTAGTGCCTCTCATGAATCG
GGTGTTTTTCAAATTTCTCCTGAGTTTCCTTGTGGCACTGGCCGTTGGGACTTTGAGTGGTGATGCTTTTTTA
CACCTTCTTCCACATTCTCATGCAAGTCACCACCATAGTCATAGCCATGAAGAACCAGCAATGGAAATGAAAA
GAGGACCACTTTTCAGTCATCTGTCTTCTCAAAACATAGAAGAAAGTGCCTATTTTGATTCCACGTGGAAGGG
TCTAACAGCTCTAGGAGGCCTGTATTTCATGTTTCTTGTTGAACATGTCCTCACATTGATCAAACAATTTAAA
GATAAGAAGAAAAAGAATCAGAAGAAACCTGAAAATGATGATGATGTGGAGATTAAGAAGCAGTTGTCCAAGT
ATGAATCTCAACTTTCAACAAATGAGGAGAAAGTAGATACAGATGATCGAACTGAAGGCTATTTACGAGCAGA
CTCACAAGAGCCCTCCCACTTTGATTCTCAGCAGCCTGCAGTCTTGGAAGAAGAAGAGGTCATGATAGCTCAT
GCTCATCCACAGGAAGTCTACAATGAATATGTACCCAGAGGGTGCAAGAATAAATGCCATTCACATTTCCACG
ATACACTCGGCCAGTCAGACGATCTCATTCACCACCATCATGACTACCATCATATTCTCCATCATCACCACCA
CCAAAACCACCATCCTCACAGTCACAGCCAGCGCTACTCTCGGGAGGAGCTGAAAGATGCCGGCGTCGCCACT
CTGGCCTGGATGGTGATAATGGGTGATGGCCTGCACAATTTCAGCGATGGCCTAGCAATTGGTGCTGCTTTTA
CTGAAGGCTTATCAAGTGGTTTAAGTACTTCTGTTGCTGTGTTCTGTCATGAGTTGCCTCATGAATTAGGTGA
CTTTGCTGTTCTACTAAAGGCTGGCATGACCGTTAAGCAGGCTGTCCTTTATAATGCATTGTCAGCCATGCTG
GCGTATCTTGGAATGGCAACAGGAATTTTCATTGGTCATTATGCTGAAAATGTTTCTATGTGGATATTTGCAC
TTACTGCTGGCTTATTCATGTATGTTGCTCTGGTTGATATGGTACCTGAAATGCTGCACAATGATGCTAGTGA
CCATGGATGTAGCCGCTGGGGGTATTTCTTTTTACAGAATGCTGGGATGCTTTTGGGTTTTGGAATTATGTTA
CTTATTTCCATATTTGAACATAAAATCGTGTTTCGTATAAATTTCTAGTTAAGGTTTAAATGCTAGAGTAGCT
TAAAAAGTTGTCATAGTTTCAGTAGGTCATAGGGAGATGAGTTTGTATGCTGTACTATGCAGCGTTTAAAGTT
AGTGGGTTTTGTGATTTTTGTATTGAATATTGCTGTCTGTTACAAAGTCAGTTAAAGGTACGTTTTAATATTT
AAGTTATTCTATCTTGGAGATAAAATCTGTATGTGCAATTCACCGGTATTACCAGTTTATTATGTAAACAAGA
GATTTGGCATGACATGTTCTGTATGTTTCAGGGAAAAATGTCTTTAATGCTTTTTCAAGAACTAACACAGTTA
TTCCTATACTGGATTTTAGGTCTCTGAAGAACTGCTGGTGTTTAGGAATAAGAATGTGCATGAAGCCTAAAAT
ACCAAGAAAGCTTATACTGAATTTAAGCAAAGAAATAAAGGAGAAAAGAGAAGAATCTGAGAATTGGGGAGGC
ATAGATTCTTATAAAAATCACAAAATTTGTTGTAAATTAGAGGGGAGAAATTTAGAATTAAGTATAAAAAGGC
AGAATTAGTATAGAGTACATTCATTAAACATTTTTGTCAGGATTATTTCCCGTAAAAACGTAGTGAGCACTTT
ATATATCACTTGACCAAGAAATTGGAATTTCAAAATGTTCGTGCGGGTATATACCAGATGAGTACAGTGAGTA
GTTTTATGTATCACCAGACTGGGTTATTGCCAAGTTATATATCACCAAAAGCTGTATGACTGGATGTTCTGGT
TACCTGGTTTACAAAATTATCAGAGTAGTAAAACTTTGATATATATGAGGATATTAAAACTACACTAAGTATC
ATTTGATTCGATTCAGAAAGTACTTTGATATCTCTCAGTGCTTCAGTGCTATCATTGTGAGCAATTGTCTTTT
ATATACGGTACTGTAGCCATACTAGGCCTGTCTGTGGCATTCTCTAGATGTTTCTTTTTTACACAATAAATTC
CTTATATCAGCTTG

| | | | |
|---|---|---|---|
| NOV9a, CG56008-01 | | | |
| Protein Sequence | SEQ ID NO: 98 | 755 aa | MW at 85046.0kD |

MARKLSVILILTFALSVTNPLHELKAAAFPQTTEKISPNWESGINVDLAISTRQYHLQQLFYRYGENNSLSVE
GFRKLLQNIGIDKIKRIHIHHDHDHHSDHEHHSDHERHSDHEHHSEHEHHSDHDHNSHHNHAASGKNKRKALC
PDHDSDSSGKDPRNSQGKGAHRPEHASGRRMVKWSVSASEVTSTVYNTVSEGTHFLETIETPRPGKLFPKDVS
SSTPPSVTSKSRVSRLAGRKTNESVSEPRKGFMYSRNTNENPQECFNASKLLTSHGMGIQVPLNATEFNYLCP
AIINQIDARSCLIHTSEKKAEIPPKTYSLQIAWVGGFIAISIISFLSLLGVILVPLMNRVFFKFLLSFLVALA
VGTLSGDAFLHLLPHSHASHHHSHSHEEPAMEMKRGPLFSHLSSQNIEESAYFDSTWKGLTALGGLYFMFLVE
HVLTLIKQFKDKKKKNQKKPENDDDVEIKKQLSKYESQLSTNEEKVDTDDRTEGYLRADSQEPSHFDSQQPAV
LEEEEVMIAHAHPQEVYNEYVPRGCKNKCHSHFHDTLGQSDDLIHHHHDYHHILHHHHHQNHHPHSHSQRYSR
EELKDAGVATLAWMVIMGDGLHNFSDGLAIGAAFTEGLSSGLSTSVAVFCHELPHELGDFAVLLKAGMTVKQA
VLYNALSAMLAYLGMATGIFIGHYAENVSMWIFALTAGLFMYVALVDMVPEMLHNDASDHGCSRWGYFFLQNA
GMLLGFGIMLLISIFEHKIVFRINF

| | | |
|---|---|---|
| NOV9b, CG56008-02 | SEQ ID NO: 99 | 912 bp |
| DNA Sequence | ORF Start: at 1 | ORF Stop: end of sequence |

AATCCCCTTTATGAACTAAAAGCAGCTGCTTTCCCTCAGACCACTGAGAAAATTAGTCCGAATTGGGAATCTG
GCATTAATGTTGACTTGGCAATTTCCACACGGCAATATCATCTACAACAGCTTTTCTACCGCTATGGAGAAAA
TAATTCTTTGTCAGTTGAAGGGTTCAGAAAATTACTTCAAAATATAGGCATAGATAAGATTAAAAGAATCCAT
ATACACCATGACCACGACCATCACTCAGACCACGAGCATCACTCAGACCATGAGCGTCACTCAGACCATGAGC
ATCACTCAGACCACGAGCATCACTCTGACCATGATCATCACTCCCACCATAATCATGCTGCTTCTGGTAAAAA
TAAGCGAAAAGCTCTTTGCCCAGACCATGACTCAGATAGTTCAGGTAAAGATCCTAGAAACAGCCAGGGGAAA
GGAGCTCACCGACCAGAACATGCCAGTGGTAGAAGGAATGTCAAGGACAGTGTTAGTGCTAGTGAAGTGACCT
CAACTGTGTACAACACTGTCTCTGAAGGAACTCACTTTCTAGAGACAATAGAGACTCCAAGACCTGGAAAACT
CTTCCCCAAAGATGTAAGCAGCTCCACTCCACCCAGTGTCACATCAAAGAGCCGGGTGAGCCGGCTGGCTGGT
AGGAAAACAAATGAATCTGTGAGTGAGCCCCGAAAAGGCTTTATGTATTCCAGAAACACAAATGAAAATCCTC
AGGAGTGTTTCAATGCATCAAAGCTACTGACATCTCATGGCATGGGCATCCAGGTTCCGCTGAATGCAACAGA
GTTCAACTATCTCTGTCCAGCCATCATCAACCAAATTGATGCTAGATCTTGTCTGATTCATACAAGTGAAAAG
AAGGCTGAAATCCCTCCAAAGACCTATTCATTACAA

| | | | |
|---|---|---|---|
| NOV9b, CG56008-02 | | | |
| Protein Sequence | SEQ ID NO: 100 | 304 aa | MW at 34320.4kD |

NPLYELKAAAFPQTTEKISPNWESGINVDLAISTRQYHLQQLFYRYGENNSLSVEGFRKLLQNIGIDKIKRIH
IHHDHDHHSDHEHHSDHERHSDHEHHSDHEHHSDHDHHSHHNHAASGKNKRKALCPDHDSDSSGKDPRNSQGK
GAHRPEHASGRRNVKDSVSASEVTSTVYNTVSEGTHFLETIETPRPGKLFPKDVSSSTPPSVTSKSRVSRLAG
RKTNESVSEPRKGFMYSRNTNENPQECFNASKLLTSHGMGIQVPLNATEFNYLCPAIINQIDARSCLIHTSEK
KAEIPPKTYSLQ

| | | |
|---|---|---|
| NOV9c, CG56008-03 | SEQ ID NO: 101 | 1186 bp |
| DNA Sequence | ORF Start: ATG at 3 | ORF Stop: TGA at 1149 |

CTATGGGCGCGGCTGCCGGGTGGCTGCGCGGCGCTGCCCCCGGACCGAGGGGCAGCCAATCCAATGAAACCAC
CGCGTGTTCGCGCCTGGTAGAGATTTCTCGAAGACACCAGTGGGCCCGTTCCGAGCCCTCTGGACCGCCCGTG
TGGAACCAAACCTGCGCGCGTGGCCGGGCCGTGGGACAACGAGGCCGCGGAGACGAAGGCGCAATGGCGAGGA
AGTTATCTGTAATCTTGATCCTGACCTTTGCCCTCTCTGTCACAAATCCCCTTCATGAACTAAAAGCAGCTGC
TTTCCCCCAGACCACTGAGAAAATTAGTCCGAATTGGGAATCTGGCATTAATGTTGACTTGGCAATTTCCACA
CGGCAATATCATCTACAACAGCTTTTCTACCGCTATGGAGAAAATAATTCTTTGTCAGTTGAAGGGTTCAGAA
AATTACTTCAAAATATAGGCATAGATAAGATTAAAAGAATCCATATACACCATGACCACGACCATCACTCAGA
CCACGAGCATCACTCAGACCATGAGCGTCACTCAGACCATGAGCATCACTCAGACCACGAGCATCACTCTGAC
CATGATCATCACTCTCACCATAATCATGCTGCTTTTACTGAAGGCTTATCAAGTGGTTTAAGTACTTCTGTTG
CTGTGTTCTGTCATGAGTTGCCTCATGAATTAGGTGACTTTGCTGTTCTACTAAAGGCTGGCATGACCGTTAA
GCAGGCTGTCCTTTATAATGCATTGTCAGCCATGCTGGCGTATCTTGGAATGGCAACAGGAATTTTCATTGGT
CATTATGCTGAAAATGTTTCTATGTGGATATTTGCACTTACTGCTGGCTTATTCATGTATGTTGCTCTGGTTG
ATATGGTACCTGAAATGCTGCACAATGATGCTAGTGACCATGGATGTAGCCACTGGGGGTATTTCTTTTTACA
GAATGCTGGGATGCTTTTGGGTTTTGGAATTATGTTACTTATTTCCATATTTGAACATAAAATCGTGTTTCGT
ATAAATTTCAATTCTCCATCATCACCACCACCAAAACCACCATCCTCACAGTCACAGCCAGCGCTACTCTCGG
GAGGAGCTGAAAGATGCCGGCGTCGCCACTCTGGCCTGGATGGTGATAATGGGTGATGGCCTGCACAATTTCA
GCGATGGCCTAGCAATTG

| | | | |
|---|---|---|---|
| NOV9c, CG56008-03 | | | |
| Protein Sequence | SEQ ID NO: 102 | 382 aa | MW at 42317.2kD |

MGAAAGWLRGAAPGPRGSQSNETTACSRLVEISRRHQWARSEPSGPPVWNQTCARGRAVGQRGRGDEGAMARK
LSVILILTFALSVTNPLHELKAAAFPQTTEKISPNWESGINVDLAISTRQYHLQQLFYRYGENNSLSVEGFRK
LLQNIGIDKIKRIHTHHDHDHHSDHEHHSDHERHSDHEHHSDHEHHSDHDHHSHHNHAAFTEGLSSGLSTSVA
VFCHELPHELGDFAVLLKAGMTVKQAVLYNALSAMLAYLGMATGIFIGHYAENVSMWIFALTAGLFMYVALVD
MVPEMLHNDASDHGCSHWGYFFLQNAGMLLGFGIMLLISIFEHKIVFRINFNSPSSPPPKPPSSQSQPALLSG
GAERCRRRHSGLDGDNG

| | | |
|---|---|---|
| NOV9d, CG56008-04 | SEQ ID NO: 103 | 1101 bp |
| DNA Sequence | ORF Start: ATG at 123 | ORF Stop: TAG at 1029 |

TGGTAGAGATTTCTCGAAGACACCAGTGGGCCCGTTCCGAGCCCTCTGGACCGCCCGTGTGGAACCAAACCTG
CGCGCGTGGCCGGGCCGTGGGACAACGAGGCCGCGGAGACGAAGGCGCAATGGCGAGGAAGTTATCTGTAATC
TTGATCCTGACCTTTGCCCTCTCTGTCACAAATCCCCTTCATGAACTAAAAGCAGCTGCTTTCCCCCAGACCA
CTGAGAAAATTAGTCCGAATTGGGAATCTGGCATTAATGTTGACTTGGCAATTTCCACACGGCAATATCATCT
ACAACAGCTTTTCTACCGCTATGGAGAAAATAATTCTTTGTCAGTTGAAGGGTTCAGAAAATTACTTCAAAAT
ATAGGCATAGATAAGATTAAAAGAATCCATATACACCATGACCACGACCATCACTCAGACCACGAGCATCACT
CAGACCATGAGCGTCACTCAGACCATGAGCATCACTCAGACCACCATCCTCACAGTCACAGCCAGCGCTACTC
TCGGGAGGAGCTGAAAGATGCCGGCGTCGCCACTTTGGCCTGGATGGTGATAATGGGTGATGGCCTGCACAAT
TTCAGCGATGGTCTAGCAATTGGTGCTGCTTTTACTGAAGGCTTATCAAGTGGTTTAAGTACTTCTGTTGCTG
TGTTCTGTCATGAGTTGCCTCATGAATTAGGTGACTTTGCTGTTCTACTAAAGGCTGGCATGACCGTTAAGCA
GGCTGTCCTTTATAATGCATTGTCAGCCATGCTGGCGTATCTTGGAATGGCAACAGGAATTTTCATTGGTCAT
TATGCTGAAAATGTTTCTATGTGGATATTTGCACTTACTGCTGGCTTATTCATGCATGTTGCTCTGGTTGATA
TGGTACCTGAAATGCTGCACAATGATGCTAGTGACCATGGATGTAGCCGCTGGGGGTATTTCTTTTTACAGAA
TGCTGGGATGCTTTTGGGTTTTGGAATTATGTTACTTATTTCCATATTTGAACATAAAATCGTGTTTCGTATA
AATTTCTAGTTAAGGTTTAAATGCTAGAGTAGCTTAAAAAGTTGTCATAGTTTCAGTAGGTCATAGGGAGATG
AGTTTG

| | | | |
|---|---|---|---|
| NOV9d, CG56008-04 | | | |
| Protein Sequence | SEQ ID NO: 104 | 302 aa | MW at 33918.4kD |

MARKLSVILILTFALSVTNPLHELKAAAFPQTTEKISPNWESGINVDLAISTRQYHLQQLFYRYGENNSLSVE
GFRKLLQNIGIDKIKRIHIHHDHDHHSDHEHHSDHERHSDHEHHSDHHPHSHSQRYSREELKDAGVATLAWMV
IMGDGLHNFSDGLAIGAAFTEGLSSGLSTSVAVFCHELPHELGDFAVLLKAGMTVKQAVLYNALSAMLAYLGM
ATGIFIGHYAENVSMWIFALTAGLFMHVALVDMVPEMLHNDASDHGCSRWGYFFLQNAGMLLGFGIMLLISIF
EHKIVFRINF

| | | |
|---|---|---|
| NOV9e, CG56008-05 | SEQ ID NO: 105 | 2268 bp |
| DNA Sequence | ORF Start: ATG at 1 | ORF Stop: TAG at 2266 |

ATGGCGAGGAAGTTATCTGTAATCTTGATCCTGACCTTTGCCCTCTCTGTCACAAACCCCCTTCATGAACTAA
AAGCAGCTGCTTTCCCCCAGACCACTGAGAAAATTAGTCCGAATTGGGAATCTGGCATTAATGTTGACTTGGC
AATTTCCACACGGCAATATCATCTACAACAGCTTTTCTACCGCTATGGAGAAAATAATTCTTTGTCAGTTGAG
GGGTTCAGAAAATTACTTCAAAATATAGGCATAGATAAGATTAAAAGAATCCATATACACCACGACCAcGACC
ATCACTCAGACCACGAGCATCACTCAGACCATGAGCGTCACTCAGACCATGAGCATCACTCAGACCACGAGCA
TCACTCTGACCATGATCATCACTCTCACCATAATCATGCTGCTTCTGGTAAAAATAAGCGAAAAGCTCTTTGC
CCAGACCATGACTCAGATAGTTCAGGTAAAGATCCTAGAAACAGCCAGGGGAAAGGAGCTCACCGACCAGAAC
ATGCCAGTGGTAGAAGGAATGTCAAGGACAGTGTTAGTGCTAGTGAAGTGACCTCAACTGTGTACAACACTGT
CTCTGAAGGAACTCACTTTCTAGAGACAATAGAGACTCCAAGACCTGGAAAACTCTTCCCCAAAGATGTAAGC
AGCTCCACTCCACCCAGTGTCACATCAAGAGCCGGGTGAGCCGGCTGGCTGGTAGGAAAACAAAATGAATCTG
TGAGTGAGCCCCGAAAAGGCTTTATGTATTCCAGAAACACAAATGAAAATCCTCAGGAGTGTTTCAATGCATC
AAAGCTACTGACATCTCATGGCATGGGCATCCAGGTTCCGCTGAATGCAACAGAGTTCAACTATCTCTGTCCA
GCCATCATCAACCAAATTGATGCTAGATCTTGTCTGATTCATACAAGTGAAAAGAAGGCTGAAATCCCTCCAA
AGACCTATTCATTACAAATAGCCTGGGTTGGTGGTTTTATAGCCATTTCCATCATCAGTTTCCTGTCTCTGCT
GGGGGTTATCTTAGTGCCTCTCATGAATCGGGTGTTTTTCAAATTTCTCCTGAGTTTCCTTGTGGCACTGGCC
GTTGGGACTTTGAGTGGTGATGCTTTTTTACACCTTCTTCCACATTCTCATGCAAGTCACCACCATAGTCATA
GCCATGAAGAACCAGCAATGGAAATGAAAAGAGGACCACTTTTTAGTCATCTGTCTTCTCAAAACATAGAAGA
AAGTGCCTATTTTGATTCCACGTGGAAGGGTCTAACAGCTCTAGGAGGCCTGTATTTCATGTTTCTTGTTGAA
CATGTCCTCACATTGATCAAACAATTTAAAGATAAGAAGAAAAAGAATCAGAAGAAACCTGAAAATGATGATG
ATGTGGAGATTAAGAAGCAGTTGTCCAAGTATGAATCTCAACTTTCAACAAATGAGGAGAAAGTAGATACAGA
TGATCGAACTGAAGGCTATTTACGAGCAGACTCACAAGAGCCCTCCCACTTTGATTCTCAGCAGCCTGCAGTC
TTGGAAGAAGAAGAGGTCATGATAGCTCATGCTCATCCACAGGAAGTCTACAATGAATATGTACCCAGAGGGT
GCAAGAATAAATGCCATTCACATTTCCACGATACACTCGGCCAGTCAGACGATCTCATTCACCACCATCATGA
CTACCATCATATTCTCCATCATCACCACCACCAAAACCACCATCCTCACAGTCACAGCCAGCGCTACTCTCGG
GAGGAGCTGAAAGATGCCGGCGTCGCCACTCTGGCCTGGATGGTGATAATGGGTGATGGCCTGCACAATTTCA
GCGATGGCCTAGCAATTGGTGCTGCTTTTACTGAAGGCTTATCAAGTGGTTTAAGTACTTCTGTTGCTGTGTT
CTGTCATGAGTTGCCTCATGAATTAGGTGACTTTGCTGTTCTACTAAAGGCTGGCATGACCGTTAAGCAGGCT
GTCCTTTATAATGCATTGTCAGCCATGCTGGCGTATCTTGGAATGGCAACAGGAATTTTCATTGGTCATTATG
CTGAAAATGTTTCTATGTGGATATTTGCACTTACTGCTGGCTTATTCATGTATGTTGCTCTGGTTGATATGGT
ACCTGAAATGCTGCACAATGATGCTAGTGACCATGGATGTAGCCGCTGGGGGTATTTCTTTTTACAGAATGCT
GGGATGCTTTTGGGTTTTGGAATTATGTTACTTATTTCCATATTTGAACATAAAATCGTGTTTCGTATAAATT
TCTAG

| | | | |
|---|---|---|---|
| NOV9e, GG56008-05 | | | |
| Protein Sequence | SEQ ID NO: 106 | 755 aa | MW at 85032.0kD |

MARKLSVILILTFALSVTNPLHELKAAAFPQTTEKISPNWESGINVDLAISTRQYHLQQLFYRYGENNSLSVE
GFRKLLQNIGIDKIKRIHIHHDHDHHSDHEHHSDHERHSDHEHHSDHEHHSDHDHHSHHNHAASGKNKRKALC
PDHDSDSSGKDPRNSQGKGAHRPEHASGRRNVKDSVSASEVTSTVYNTVSEGTHFLETIETPRPGKLFPKDVS
SSTPPSVTSKSRVSRLAGRKTNESVSEPRKGFMYSRNTNENPQECFNASKLLTSHGMGIQVPLNATEFNYLCP
AIINQIDARSCLIHTSEKKAEIPPKTYSLQIAWVGGFIAISIISFLSLLGVILVPLMNRVFFKFLLSFLVALA
VGTLSGDAFLHLLPHSHASHHHSHSHEEPAMEMKRGPLFSHLSSQNIEESAYFDSTWKGLTALGGLYFMFLVE
HVLTLIKQFKDKKKKNQKKPENDDDVEIKKQLSKYESQLSTNEEKVDTDDRTEGYLRADSQEPSHFDSQQPAV
LEEEEVMIAHAHPQEVYNEYVPRGCKNKCHSHFHDTLGQSDDLIHHHHDYHHILHHHHHQNHHPHSHSQRYSR
EELKDAGVATLAWMVIMGDGLHNFSDGLAIGAAFTEGLSSGLSTSVAVFCHELPHELGDFAVLLKAGMTVKQA
VLYNALSAMLAYLGMATGIFIGHYAENVSMWIFALTAGLFMYVALVDMVPEMLHNDASDHGCSRWGYFFLQNA
GMLLGFGIMLLISIFEHKIVFRINF

| | | |
|---|---|---|
| NOV9f, CG56008-06 | SEQ ID NO: 107 | 2310 bp |
| DNA Sequence | ORF Start: ATG at 11 | ORF Stop: TAG at 2308 |

ATGGGTAAGCCTATCCCTAACCCTCTCCTCGGTCTCGATTCTACGGCGAGGAAGTTATCTGTAATCTTGATCC
TGACCTTTGCCCTCTCTGTCACAAACCCCCTTCATGAACTAAAAGCAGCTGCTTTCCCCCAGACCACTGAGAA
AATTAGTCCGAATTGGGAATCTGGCATTAATGTTGACTTGGCAATTTCCACACGGCAATATCATCTACAACAG
CTTTTCTACCGCTATGGAGAAAATAATTCTTTGTCAGTTGAGGGGTTCAGAAAATTACTTCAAAATATAGGCA
TAGATAAGATTAAAAGAATCCATATACACCACGACCACGACCATCACTCAGACCACGAGCATCACTCAGACCA
TGAGCGTCACTCAGACCATGAGCATCACTCAGACCACGAGCATCACTCTGACCATGATCATCACTCTCACCAT
AATCATGCTGCTTCTGGTAAAAATAAGCGAAAAGCTCTTTGCCCAGACCATGACTCAGATAGTTCAGGTAAAG
ATCCTAGAAACAGCCAGGGGAAAGGAGCTCACCGACCAGAACATGCCAGTGGTAGAAGGAATGTCAAGGACAG
TGTTAGTGCTAGTGAAGTGACCTCAACTGTGTACAACACTGTCTCTGAAGGAACTCACTTTCTAGAGACAATA
GAGACTCCAAGACCTGGAAAACTCTTCCCCAAAGATGTAAGCAGCTCCACTCCACCCAGTGTCACATCAAAGA
GCCGGGTGAGCCGGCTGGCTGGTAGGAAAACAAATGAATCTGTGAGTGAGCCCCGAAAAGGCTTTATGTATTC
CAGAAACACAAATGAAAATCCTCAGGAGTGTTTCAATGCATCAAAGCTACTGACATCTCATGGCATGGGCATC
CAGGTTCCGCTGAATGCAACAGAGTTCAACTATCTCTGTCCAGCCATCATCAACCAAATTGATGCTAGATCTT
GTCTGATTCATACAAGTGAAAAGAAGGCTGAAATCCCTCCAAAGACCTATTCATTACAAATAGCCTGGGTTGG
TGGTTTTATAGCCATTTCCATCATCAGTTTCCTGTCTCTGCTGGGGGTTATCTTAGTGCCTCTCATGAATCGG
GTGTTTTTCAAATTTCTCCTGAGTTTCCTTGTGGCACTGGCCGTTGGGACTTTGAGTGGTGATGCTTTTTTAC
ACCTTCTTCCACATTCTCATGCAAGTCACCACCATAGTCATAGCCATGAAGAACCAGCAATGGAAATGAAAAG
AGGACCACTTTTTAGTCATCTGTCTTCTCAAAACATAGAAGAAAGTGCCTATTTTGATTCCACGTGGAAGGGT
CTAACAGCTCTAGGAGGCCTGTATTTCATGTTTCTTGTTGAACATGTCCTCACATTGATCAAACAATTTAAAG
ATAAGAAGAAAAAGAATCAGAAGAAACCTGAAAATGATGATGATGTGGAGATTAAGAAGCAGTTGTCCAAGTA
TGAATCTCAACTTTCAACAAATGAGGAGAAAGTAGATACAGATGATCGAACTGAAGGCTATTTACGAGCAGAC
TCACAAGAGCCCTCCCACTTTGATTCTCAGCAGCCTGCAGTCTTGGAAGAAGAAGAGGTCATGATAGCTCATG
CTCATCCACAGGAAGTCTACAATGAATATGTACCCAGAGGGTGCAAGAATAAATGCCATTCACATTTCCACGA
TACACTCGGCCAGTCAGACGATCTCATTCACCACCATCATGACTACCATCATATTCTCCATCATCACCACCAC
CAAAACCACCATCCTCACAGTCACAGCCAGCGCTACTCTCGGGAGGAGCTGAAAGATGCCGGCGTCGCCACTC
TGGCCTGGATGGTGATAATGGGTGATGGCCTGCACAATTTCAGCGATGGCCTAGCAATTGGTGCTGCTTTTAC
TGAAGGCTTATCAAGTGGTTTAAGTACTTCTGTTGCTGTGTTCTGTCATGAGTTGCCTCATGAATTAGGTGAC
TTTGCTGTTCTACTAAAGGCTGGCATGACCGTTAAGCAGGCTGTCCTTTATAATGCATTGTCAGCCATGCTGG
CGTATCTTGGAATGGCAACAGGAATTTTCATTGGTCATTATGCTGAAAATGTTTCTATGTGGATATTTGCACT
TACTGCTGGCTTATTCATGTATGTTGCTCTGGTTGATATGGTACCTGAAATGCTGCACAATGATGCTAGTGAC
CATGGATGTAGCCGCTGGGGGTATTTCTTTTTACAGAATGCTGGGATGCTTTTGGGTTTTGGAATTATGTTAC
TTATTTCCATATTTGAACATAAAATCGTGTTTCGTATAAATTTCTAG

| | | | |
|---|---|---|---|
| NOV9f, CG56008-06 | +TL,15 | | |
| Protein Sequence | SEQ ID NO: 108 | 769 aa | MW at 86435.6kD |

MGKPIPNPLLGLDSTARKLSVILILTFALSVTNPLHELKAAAFPQTTEKISPNWESGINVDLAISTRQYHLQQ
LFYRYGENNSLSVEGFRKLLQNIGIDKIKRIHIHHDHDHHSDHEHHSDHERHSDHEHHSDHEHHSDHDHHSHH
NHAASGKNKRKALCPDHDSDSSGKDPRNSQGKGAHRPEHASGRRNVKDSVSASEVTSTVYNTVSEGTHFLETI
ETPRPGKLFPKDVSSSTPPSVTSKSRVSRLAGRKTNESVSEPRKGFMYSRNTNENPQECFNASKLLTSHGMGI
QVPLNATEFNYLCPAIINQIDARSCLIHTSEKKAEIPPKTYSLQIAWVGGFIAISIISFLSLLGVILVPLMNR
VFFKFLLSFLVALAVGTLSGDAFLHLLPHSHASHHHSHSHEEPAMEMKRGPLFSHLSSQNIEESAYFDSTWKG
LTALGGLYFMFLVEHVLTLIKQFKDKKKKNQKKPENDDDVEIKKQLSKYESQLSTNEEKVDTDDRTEGYLRAD
SQEPSHFDSQQPAVLEEEEVMIAHAHPQEVYNEYVPRGCKNKCHSHFHDTLGQSDDLIHHHHDYHHILHHHHH
QNHHPHSHSQRYSREELKDAGVATLAWMVIMGDGLHNFSDGLAIGAAFTEGLSSGLSTSVAVFCHELPHELGD
FAVLLKAGMTVKQAVLYNALSAMLAYLGMATGIFIGHYAENVSMWIFALTAGLFMYVALVDMVPEMLHNDASD
HGCSRWGYFFLQNAGMLLGFGIMLLISIFEHKIVFRINF

| | | |
|---|---|---|
| NOV9g, 311531751 | SEQ ID NO: 109 | 2211 bp |
| DNA Sequence | ORF Start: at 1 | ORF Stop: end of sequence |

AATCCCCTTCATGAACTAAAAGCAGCTGCTTTCCCCCAGACCACTGAGAAAATTAGTCCGAATTGGGAATCTG
GCATTAATGTTGACTTGGCAATTTCCACACGGCAATATCATCTACAACAGCTTTTCTACCGCTATGGAGAAAA
TAATTCTTTGTCAGTTGAGGGGTTCAGAAAATTACTTCAAAATATAGGCATAGATAAGATTAAAAGAATCCAT
ATACACCACGACCACGACCATCACTCAGACCACGAGCATCACTCAGACCATGAGCGTCACTCAGACCATGAGC
ATCACTCAGACCACGAGCATCACTCTGACCATGATCATCACTCTCACCATAATCATGCTGCTTCTGGTAAAAA
TAAGCGAAAAGCTCTTTGCCCAGACCATGACTCAGATAGTTCAGGTAAAGATCCTAGAAACAGCCAGGGGAAA
GGAGCTCACCGACCAGACATGCCAGTGGTAGAGGAATGTCAAGGACAGTGTTAGTGCTAGTGAAAAGTGACCT
CAACTGTGTACAACACTGTCTCTGAAGGAACTCACTTTCTAGAGACAATAGAGACTCCAAGACCTGGAAAACT
CTTCCCCAAAGATGTAAGCAGCTCCACTCCACCCAGTGTCACATCAAAGAGCCGGGTGAGCCGGCTGGCTGGT
AGGAAAACAAATGAATCTGTGAGTGAGCCCCGAAAAGGCTTTATGTATTCCAGAAACACAAATGAAAATCCTC
AGGAGTGTTTCAATGCATCAAAGCTACTGACATCTCATGGCATGGGCATCCAGGTTCCGCTGAATGCAACAGA
GTTCAACTATCTCTGTCCAGCCATCATCAACCAAATTGATGCTAGATCTTGTCTGATTCATACAAGTGAAAAG
AAGGCTGAAATCCCTCCAAAGACCTATTCATTACAAATAGCCTGGGTTGGTGGTTTTATAGCCATTTCCATCA
TCAGTTTCCTGTCTCTGCTGGGGGTTATCTTAGTGCCTCTCATGAATCGGGTGTTTTTCAAATTTCTCCTGAG
TTTCCTTGTGGCACTGGCCGTTGGGACTTTGAGTGGTGATGCTTTTTTACACCTTCTTCCACATTCTCATGCA
AGTCACCACCATAGTCATAGCCATGAAGAACCAGCAATGGAAATGAAAAGAGGACCACTTTTTAGTCATCTGT
CTTCTCAAAACATAGAAGAAAGTGCCTATTTTGATTCCACGTGGAAGGGTCTAACAGCTCTAGGAGGCCTGTA
TTTCATGTTTCTTGTTGAACATGTCCTCACATTGATCAAACAATTTAAAGATAAGAAGAAAAAGAATCAGAAG
AAACCTGAAAATGATGATGATGTGGAGATTAAGAAGCAGTTGTCCAAGTATGAATCTCAACTTTCAACAAATG
AGGAGAAAGTAGATACAGATGATCGAACTGAAGGCTATTTACGAGCAGACTCACAAGAGCCCTCCCACTTTGA
TTCTCAGCAGCCTGCAGTCTTGGAAGAAGAAGAGGTCATGATAGCTCATGCTCATCCACAGGAAGTCTACAAT
GAATATGTACCCAGAGGGTGCAAGAATAAATGCCATTCACATTTCCACGATACACTCGGCCAGTCAGACGATC
TCATTCACCACCATCATGACTACCATCATATTCTCCATCATCACCACCACCAAAACCACCATCCTCACAGTCA
CAGCCAGCGCTACTCTCGGGAGGAGCTGAAAGATGCCGGCGTCGCCACTCTGGCCTGGATGGTGATAATGGGT
GATGGCCAGCACAATTTCAGCGATGGCCTAGCAATTGGTGATGCTTTTACTGAAGGCTTATCAAGTGGTTTAA
GTACTTCTGTTGCTGTGTTCTGTCATGAGTTGCCTCATGAATTAGGTGACTTTGCTGTTCTACTAAAGGCTGG
CATGACCGTTAAGCAGGCTGTCCTTTATAATGCATTGTCAGCCATGCTGGCGTATCTTGGAATGGCAACAGGA
ATTTTCATTGGTCATTATGCTGAAAATGTTTCTATGTGGATATTTGCACTTACTGCTGGCTTATTCATGTATG
TTGCTCTGGTTGATATGGTACCTGAAATGCTGCACAATGATGCTAGTGACCATGGATGTAGCCGCTGGGGGTA
TTTCTTTTTACAGAATGCTGGGATGCTTTTGGGTTTTGGAATTATGTTACTTATTTCCATATTTGAACATAAA
ATCGTGTTTCGTATAAATTTC

| | | | |
|---|---|---|---|
| NOV9g, 311531751 | | | |
| Protein Sequence | SEQ ID NO: 110 | 737 aa | MW at 83133.4kD |

NPLHELKAAAFPQTTEKISPNWESGINVDLAISTRQYHLQQLFYRYGENNSLSVEGFRKLLQNIGIDKIKRIH
THHDHDHHSDHEHHSDHERHSDHEHHSDHEHHSDHDHHSHHNHAASGKNKRKALCPDHDSDSSGKDPRNSQGK
GAHRPEHASGRRNVKDSVSASEVTSTVYNTVSEGTHFLETIETPRPGKLFPKDVSSSTPPSVTSKSRVSRLAG
RKTNESVSEPRKGFMYSRNTNENPQECFNASKLLTSHGMGIQVPLNATEFNYLCPAIINQIDARSCLIHTSEK
KAEIPPKTYSLQIAWVGGFIAISIISFLSLLGVTLVPLMNRVFFKFLLSFLVALAVGTLSGDAFLHLLPHSHA
SHHHSHSHEEPAMEMKRGPLFSHLSSQNIEESAYFDSTWKGLTALGGLYFMFLVEHVLTLIKQFKDKKKKNQK
KPENDDDVEIKKQLSKYESQLSTNEEKVDTDDRTEGYLRADSQEPSHFDSQQPAVLEEEEVMIAHAHPQEVYN
EYVPRGCKNKCHSHFHDTLGQSDDLIHHHHDYHHILHHHHHQNNHPHSHSQRYSREELKDAGVATLAWMVIMG
DGQHNFSDGLAIGDAFTEGLSSGLSTSVAVFCHELPHELGDFAVLLKAGMTVKQAVLYNALSAMLAYLGMATG
IFIGHYAENVSMWIFALTAGLFMYVALVDMVPEMLHNDASDHGCSRWGYFFLQNAGMLLGFGIMLLISIFEHK
IVFRINF

| | | |
|---|---|---|
| NOV9h, SNP 13376562 | SEQ ID NO: 111 | 3445 bp |
| DNA Sequence | ORF Start: ATG at 117 | ORF Stop: TAG at 2382 |

CACCGCGTGTTCGCGCCTGGTAGAGATTTCTCGAAGACACCAGTGGGCCCGTGTGGAACCAAACCTGCGCGCG
TGGCCGGGCCGTGGGACAACGAGGCCGCGGAGACGAAGGCGCAATGGCGAGGAAGTTATCTGTAATCTTGATC
CTGACCTTTGCCCCCTCTGTCACAAATCCCCTTCATGAACTAAAAGCAGCTGCTTTCCCCCAGACCACTGAGA
AAATTAGTCCGAATTGGGAATCTGGCATTAATGTTGACTTGGCAATTTCCACACGGCAATATCATCTACAACA
GCTTTTCTACCGCTATGGAGAAAATAATTCTTTGTCAGTTGAAGGGTTCAGAAAATTACTTCAAAATATAGGC
ATAGATAAGATTAAAAGAATCCATATACACCATGACCACGACCATCACTCAGACCACGAGCATCACTCAGACC
ATGAGCGTCACTCAGACCATGAGCATCACTCAGAGCACGAGCATCACTCTGACCATGATCATCACTCTCACCA
TAATCATGCTGCTTCTGGTAAAAATAAGCGAAAAGCTCTTTGCCCAGACCATGACTCAGATAGTTCAGGTAAA
GATCCTAGAAACAGCCAGGGGAAAGGAGCTCACCGACCAGAACATGCCAGTGGTAGAAGGAATGTCAAGGACA
GTGTTAGTGCTAGTGAAGTGACCTCAACTGTGTACAACACTGTCTCTGAAGGAACTCACTTTCTAGAGACAAT
AGAGACTCCAAGACCTGGAAAACTCTTCCCCAAAGATGTAAGCAGCTCCACTCCACCCAGTGTCACATCAAAG
AGCCGGGTGAGCCGGCTGGCTGGTAGGAAAACAAATGAATCTGTGAGTGAGCCCCGAAAAGGCTTTATGTATT
CCAGAAACACAAATGAAAATCCTCAGGAGTGTTTCAATGCATCAAAGCTACTGACATCTCATGGCATGGGCAT
CCAGGTTCCGCTGAATGCAACAGAGTTCAACTATCTCTGTCCAGCCATCATCAACCAAATTGATGCTAGATCT
TGTCTGATTCATACAAGTGAAAAGAAGGCTGAAATCCCTCCAAAGACCTATTCATTACAAATAGCCTGGGTTG
GTGGTTTTATAGCCATTTCCATCATCAGTTTCCTGTCTCTGCTGGGGGTTATCTTAGTGCCTCTCATGAATCG
GGTGTTTTTCAAATTTCTCCTGAGTTTCCTTGTGGCACTGGCCGTTGGGACTTTGAGTGGTGATGCTTTTTTA
CACCTTCTTCCACATTCTCATGCAAGTCACCACCATAGTCATAGCCATGAAGAACCAGCAATGGAAATGAAAA
GAGGACCACTTTTCAGTCATCTGTCTTCTCAAAACATAGAAGAAAGTGCCTATTTTGATTCCACGTGGAAGGG
TCTAACAGCTCTAGGAGGCCTGTATTTCATGTTTCTTGTTGAACATGTCCTCACATTGATCAAACAATTTAAA
GATAAGAAGAAAAAGAATCAGAAGAAACCTGAAAATGATGATGATGTGGAGATTAAGAAGCAGTTGTCCAAGT
ATGAATCTCAACTTTCAACAAATGAGGAGAAAGTAGATACAGATGATCGAACTGAAGGCTATTTACGAGCAGA
CTCACAAGAGCCCTCCCACTTTGATTCTCAGCAGCCTGCAGTCTTGGAAGAAGAAGAGGTCATGATAGCTCAT
GCTCATCCACAGGAAGTCTACAATGAATATGTACCCAGAGGGTGCAAGAATAAATGCCATTCACATTTCCACG
ATACACTCGGCCAGTCAGACGATCTCATTCACCACCATCATGACTACCATCATATTCTCCATCATCACCACCA
CCAAAACCACCATCCTCACAGTCACAGCCAGCGCTACTCTCGGGAGGAGCTGAAAGATGCCGGCGTCGCCACT
CTGGCCTGGATGGTGATAATGGGTGATGGCCTGCACAATTTCAGCGATGGCCTAGCAATTGGTGCTGCTTTTA
CTGAAGGCTTATCAAGTGGTTTAAGTACTTCTGTTGCTGTGTTCTGTCATGAGTTGCCTCATGAATTAGGTGA
CTTTGCTGTTCTACTAAAGGCTGGCATGACCGTTAAGCAGGCTGTCCTTTATAATGCATTGTCAGCCATGCTG
GCGTATCTTGGAATGGCAACAGGAATTTTCATTGGTCATTATGCTGAAAATGTTTCTATGTGGATATTTGCAC
TTACTGCTGGCTTATTCATGTATGTTGCTCTGGTTGATATGGTACCTGAAATGCTGCACAATGATGCTAGTGA
CCATGGATGTAGCCGCTGGGGGTATTTCTTTTTACAGAATGCTGGGATGCTTTTGGGTTTTGGAATTATGTTA
CTTATTTCCATATTTGAACATAAAATCGTGTTTCGTATAAATTTCTAGTTAAGGTTTAAATGCTAGAGTAGCT
TAAAAAGTTGTCATAGTTTCAGTAGGTCATAGGGAGATGAGTTTGTATGCTGTACTATGCAGCGTTTAAAGTT
AGTGGGTTTTGTGATTTTTGTATTGAATATTGCTGTCTGTTACAAAGTCAGTTAAAGGTACGTTTTAATATTT
AAGTTATTCTATCTTGGAGATAAAATCTGTATGTGCAATTCACCGGTATTACCAGTTTATTATGTAAACAAGA
GATTTGGCATGACATGTTCTGTATGTTTCAGGGAAAAATGTCTTTAATGCTTTTTCAAGAACTAACACAGTTA
TTCCTATACTGGATTTTAGGTCTCTGAAGAACTGCTGGTGTTTAGGAATAAGAATGTGCATGAAGCCTAAAAT
ACCAAGAAAGCTTATACTGAATTTAAGCAAAGAAATAAAGGAGAAAAGAGAAGAATCTGAGAATTGGGGAGGC
ATAGATTCTTATAAAAATCACAAAATTTGTTGTAAATTAGAGGGGAGAAATTTAGAATTAAGTATAAAAAGGC
AGAATTAGTATAGAGTACATTCATTAAACATTTTTGTCAGGATTATTTCCCGTAAAAACGTAGTGAGCACTTT
TCATATACTAATTTAGTTGTACATTTAACTTTGTATAATACAGAAATCTAATATATTTAAATGAATTCAAGCA
ATATATCACTTGACCAAGAAATTGGAATTTCAAAATGTTCGTGCGGGTATATACCAGATGAGTACAGTGAGTA
GTTTTATGTATCACCAGACTGGGTTATTGCCAAGTTATATATCACCAAAAGCTGTATGACTGGATGTTCTGGT
TACCTGGTTTACAAAATTATCAGAGTAGTAAAACTTTGATATATATGAGGATATTAAAACTACACTAAGTATC
ATTTGATTCGATTCAGAAAGTACTTTGATATCTCTCAGTGCTTCAGTGCTATCATTGTGAGCAATTGTCTTTT
ATATACGGTACTGTAGCCATACTAGGCCTGTCTGTGGCATTCTCTAGATGTTTCTTTTTTACACAATAAATTC
CTTATATCAGCTTG

| | | | |
|---|---|---|---|
| NOV9h, SNP 13376562 | | | |
| Protein Sequence | SEQ ID NO: 112 | 755 aa | MW at 85030.0kD |

MARKLSVILILTFAPSVTNPLHELKAAAFPQTTEKISPNWESGINVDLAISTRQYHLQQLFYRYGENNSLSVE
GFRKLLQNIGIDKIKRIHIHHDHDHHSDHEHHSDHERHSDHEHHSEHEHHSDHDHHSHHNHAASGKNKRKALC
PDHDSDSSGKDPRNSQGKGAHRPEHASGRRNVKDSVSASEVTSTVYNTVSEGTHFLETIETPRPGKLFPKDVS
SSTPPSVTSKSRVSRLAGRKTNESVSEPRKGFMYSRNTNENPQECFNASKLLTSHGMGIQVPLNATEFNYLCP
AIINQIDARSCLIHTSEKKAEIPPKTYSLQIAWVGGFIAISIISFLSLLGVILVPLMNRVFFKFLLSFLVALA
VGTLSGDAFLHLLPHSHASHHHSHSHEEPANEMKRGPLFSHLSSQNIEESAYFDSTWKGLTALGGLYFMFLVE
HVLTLIKQFKDKKKKNQKKPENDDDVEIKKQLSKYESQLSTNEEKVDTDDRTEGYLRADSQEPSHFDSQQPAV
LEEEEVMIAHAHPQEVYNEYVPRGCKNKCHSHFHDTLGQSDDLIHHHHDYHHILHHHHHQNHHPHSHSQRYSR
EELKDAGVATLAWMVIMGDGLHNFSDGLAIGAAFTEGLSSGLSTSVAVFCHELPHELGDFAVLLKAGMTVKQA
VLYNALSAMLAYLGMATGIFIGHYAENVSMWIFALTAGLFMYVALVDMVPEMLHNDASDHGCSRWGYFFLQNA
GMLLGFGIMLLISIFEHKIVFRINF

| | | |
|---|---|---|
| NOV9i, CG56008 | SEQ ID NO: 113 | 3445 bp |
| DNA Sequence | ORF Start: ATG at | ORF Stop TAG at 2382 |

CACCGCGTGTTCGCGCCTGGTAGAGATTTCTCGAAGACACCAGTGGGCCCGTGTGGAACCAAACCTGCGCGCG
TGGCCGGGCCGTGGGACAACGAGGCCGCGGAGACGAAGGCGCAATGGCGAGGAAGTTATCTGTAATCTTGATC
CTGACCTTTGCCCX₁CTCTGTCACAAATCCCCTTCATGAACTAAAAGCAGCTGCTTTCCCCCAGACCACTGAG
AAAATTAGTCCGAATTGGGAATCTGGCATTAATGTTGACTTGGCAATTTCCACACGGCAATATCATCTACAAC
AGCTTTTCTACCGCTATGGAGAAAATAATTCTTTGTCAGTTGAAGGGTTCAGAAAATTACTTCAAAATATAGG
CATAGATAAGATTAAAAGAATCCATATACACCATGACCACGACCATCACTCAGACCACGAGCATCACTCAGAC
CATGAGCGTCACTCAGACCATGAGCATCACTCAGAGCACGAGCATCACTCTGACCATGATCATCACTCTCACC
ATAATCATGCTGCTTCTGGTAAAAATAAGCGAAAAGCTCTTTGCCCAGACCATGACTCAGATAGTTCAGGTAA
AGATCCTAGAAACAGCCAGGGGAAAGGAGCTCACCGACCAGAACATGCCAGTGGTAGAAGGAATGTCAAGGAC
AGTGTTAGTGCTAGTGAAGTGACCTCAACTGTGTACAACACTGTCTCTGAAGGAACTCACTTTCTAGAGACAA
TAGAGACTCCAAGACCTGGAAAACTCTTCCCCAAAGATGTAAGCAGCTCCACTCCACCCAGTGTCACATCAAA
GAGCCGGGTGAGCCGGCTGGCTGGTAGGAAAACAAATGAATCTGTGAGTGAGCCCCGAAAAGGCTTTATGTAT
TCCAGAAACACAAATGAAAATCCTCAGGAGTGTTTCAATGCATCAAAGCTACTGACATCTCATGGCATGGGCA
TCCAGGTTCCGCTGAATGCAACAGAGTTCAACTATCTCTGTCCAGCCATCATCAACCAAATTGATGCTAGATC
TTGTCTGATTCATACAAGTGAAAAGAAGGCTGAAATCCCTCCAAAGACCTATTCATTACAAATAGCCTGGGTT
GGTGGTTTTATAGCCATTTCCATCATCAGTTTCCTGTCTCTGCTGGGGGTTATCTTAGTGCCTCTCATGAATC
GGGTGTTTTTCAAATTTCTCCTGAGTTTCCTTGTGGCACTGGCCGTTGGGACTTTGAGTGGTGATGCTTTTTT
ACACCTTCTTCCACATTCTCATGCAAGTCACCACCATAGTCATAGCCATGAAGAACCAGCAATGGAAATGAAA
AGAGGACCACTTTTCAGTCATCTGTCTTCTCAAAACATAGAAGAAAGTGCCTATTTTGATTCCACGTGGAAGG
GTCTAACAGCTCTAGGAGGCCTGTATTTCATGTTTCTTGTTGAACATGTCCTCACATTGATCAAACAATTTAA
AGATAAGAAGAAAAAGAATCAGAAGAAACCTGAAAATGATGATGATGTGGAGATTAAGAAGCAGTTGTCCAAG
TATGAATCTCAACTTTCAACAAATGAGGAGAAAGTAGATACAGATGATCGAACTGAAGGCTATTTACGAGCAG
ACTCACAAGAGCCCTCCCACTTTGATTCTCAGCAGCCTGCAGTCTTGGAAGAAGAAGAGGTCATGATAGCTCA
TGCTCATCCACAGGAAGTCTACAATGAATATGTACCCAGAGGGTGCAAGAATAAATGCCATTCACATTTCCAC
GATACACTCGGCCAGTCAGACGATCTCATTCACCACCATCATGACTACCATCATATTCTCCATCATCACCACC
ACCAAAACCACCATCCTCACAGTCACAGCCAGCGCTACTCTCGGGAGGAGCTGAAAGATGCCGGCGTCGCCAC
TCTGGCCTGGATGGTGATAATGGGTGATGGCCTGCACAATTTCAGCGATGGCCTAGCAATTGGTGCTGCTTTT
ACTGAAGGCTTATCAAGTGGTTTAAGTACTTCTGTTGCTGTGTTCTGTCATGAGTTGCCTCATGAATTAGGTG
ACTTTGCTGTTCTACTAAAGGCTGGCATGACCGTTAAGCAGGCTGTCCTTTATAATGCATTGTCAGCCATGCT
GGCGTATCTTGGAATGGCAACAGGAATTTTCATTGGTCATTATGCTGAAAATGTTTCTATGTGGATATTTGCA
CTTACTGCTGGCTTATTCATGTATGTTGCTCTGGTTGATATGGTACCTGAAATGCTGCACAATGATGCTAGTG
ACCATGGATGTAGCCGCTGGGGGTATTTCTTTTTACAGAATGCTGGGATGCTTTTGGGTTTTGGAATTATGTT
ACTTATTTCCATATTTGAACATAAAATCGTGTTTCGTATAAATTTCTAGTTAAGGTTTAAATGCTAGAGTAGC
TTAAAAAGTTGTCATAGTTTCAGTAGGTCATAGGGAGATGAGTTTGTATGCTGTACTATGCAGCGTTTAAAGT
TAGTGGGTTTTGTGATTTTTGTATTGAATATTGCTGTCTGTTACAAAGTCAGTTAAAGGTACGTTTTAATATT
TAAGTTATTCTATCTTGGAGATAAAATCTGTATGTGCAATTCACCGGTATTACCAGTTTATTATGTAAACAAG
AGATTTGGCATGACATGTTCTGTATGTTTCAGGGAAAAATGTCTTTAATGCTTTTTCAAGAACTAACACAGTT
ATTCCTATACTGGATTTTAGGTCTCTGAAGAACTGCTGGTGTTTAGGAATAAGAATGTGCATGAAGCCTAAAA
TACCAAGAAAGCTTATACTGAATTTAAGCAAAGAAATAAAGGAGAAAAGAGAAGAATCTGAGAATTGGGGAGG
CATAGATTCTTATAAAAATCACAAAATTTGTTGTAAATTAGAGGGGAGAAATTTAGAATTAAGTATAAAAAGG
CAGAATTAGTATAGAGTACATTCATTAAACATTTTTGTCAGGATTATTTCCCGTAAAAACGTAGTGAGCACTT
TTCATATACTAATTTAGTTGTACATTTAACTTTGTATAATACAGAAATCTAAATATATTTAATGAATTCAAGC
AATATATCACTTGACCAAGAAATTGGAATTTCAAAATGTTCGTGCGGGTATATACCAGATGAGTACAGTGAGT
AGTTTTATGTATCACCAGACTGGGTTATTGCCAAGTTATATATCACCAAAAGCTGTATGACTGGATGTTCTGG
TTACCTGGTTTACAAAATTATCAGAGTAGTAAAACTTTGATATATATGAGGATATTAAAACTACACTAAGTAT
CATTTGATTCGATTCAGAAAGTACTTTGATATCTCTCAGTGCTTCAGTGCTATCATTGTGAGCAATTGTCTTT
TATATACGGTACGTAGCCATACTAGGCCTGTCTGTGGCATTCTCTAGATGTTTCTTTTTTACACAATAAATTC
CTTATATCAGCTTGT
[Wherein residue X₁ is T or C.]

| | | | |
|---|---|---|---|
| NOV9i, CG56008 | | | |
| Protein Sequence | SEQ ID NO: 114 | 755 aa | MW at 85046.0kD |

MARKLSVILILTFAZ₁SVTNPLHELKAAAFPQTTEKISPNWESGINVDLAISTRQYHLQQLFYRYGENNSLSV
EGFRKLLQNIGIDKIKRIHIHHDHDHHSDHEHHSDHERHSDHEHHSEHEHHSDHDHHSHHNHAASGKNKRKAL
CPDHDSDSSGKDPRNSQGKGAHRPEHASGRRNVKDSVSASEVTSTVYNTVSEGTHFLETIETPRPGKLFPKDV
SSSTPPSVTSKSRVSRLAGRKTNESVSEPRKGFMYSRNTNENPQECFNASKLLTSHGMGIQVPLNATEFNYLC
PAIINQIDARSCLIHTSEKKAEIPPKTYSLQIAWVGGFIAISIISFLSLLGVILVPLMNRVFFKFLLSFLVAL
AVGTLSGDAFLHLLPHSHASHHHSHSHEEPAMEMKRGPLFSHLSSQNIEESAYFDSTWKGLTALGGLYFMFLV
EHVLTLIKQFKDKKKKNQKKPENDDDVEIKKQLSKYESQLSTNEEKVDTDDRTEGYLRADSQEPSHFDSQQPA
VLEEEEVMIAHAHPQEVYNEYVPRGCKNKCHSHFHDTLGQSDDLIHHHHDYHHILHHHHHQNHHPHSHSQRYS
REELKDAGVATLAWMVIMGDGLHNFSDGLAIGAAFTEGLSSGLSTSVAVFCHELPHELGDFAVLLKAGMTVKQ
AVLYNALSANLAYLGMATGIFIGHYAENVSMWIFALTAGLFMYVALVDMVFEMLHNDASDHGCSRWGYFFLQN
AGMLLGFGIMLLISIFEHKIVFRINF
[Wherein residue Z₁ is L or P.]

[0341] A ClustalW comparison of the above protein sequences yields the following sequence alignment shown in Table 9B.

TABLE 9B
Comparison of the NOV9 protein sequences.

| | |
|---|---|
| NOV9a | |
| NOV9b | ------------------------------------------------------------ |
| NOV9c | MGAAAGWLRGAAPGPRGSQSNETTACSRLVEISRRHQWARSEPSGPPVWNQTCARGRAVG |
| NOV9d | ------------------------------------------------------------ |
| NOV9e | ------------------------------------------------------------ |
| NOV9f | -------------------------------------------------------MGKPI |
| NOV9g | ------------------------------------------------------------ |
| NOV9a | ---------MARKLSVILILTFALSVTNPLHELKAAAFPQTTEKISPNWESGINVDLAIS |
| NOV9b | ---------------------------NPLYELKAAAFPQTTEKISPNWESGINVDLAIS |
| NOV9c | QRGRGDEGAMARKLSVILILTFALSVTNPLHELKAAAFPQTTEKISPNWESGINVDLAIS |
| NOV9d | ---------MARKLSVILILTFALSVTNPLHELKAAAFPQTTEKISPNWESGINVDLAIS |
| NOV9e | ---------MARKLSVILILTFALSVTNPLHELKAAAFPQTTEKISPNWESGINVDLAIS |
| NOV9f | PNPLLGLDSTARKLSVILILTFALSVTNPLHELKAAAFPQTTEKISPNWESGINVDLAIS |
| NOV9g | ---------------------------NPLHELKAAAFPQTTEKISPNWESGINVDLAIS |
| NOV9a | TRQYHLQQLFYRYGENNSLSVEGFRKLLQNIGIDKIKRIHIHHDHDHHSDHEHHSDHERH |
| NOV9b | TRQYHLQQLFYRYGENNSLSVEGFRKLLQNIGIDKIKRIHIHHDHDHHSDHEHHSDHERH |
| NOV9c | TRQYHLQQLFYRYGENNSLSVEGFRKLLQNIGIDKIKRIHIHHDHDHHSDHEHHSDHERH |
| NOV9d | TRQYHLQQLFYRYGENNSLSVEGFRKLLQNIGIDKIKRIHIHHDHDHHSDHEHHSDHERH |
| NOV9e | TRQYHLQQLFYRYGENNSLSVEGFRKLLQNIGIDKIKRIHIHHDHDHHSDHEHHSDHERH |
| NOV9f | TRQYHLQQLFYRYGENNSLSVEGFRKLLQNIGIDKIKRIHIHHDHDHHSDHEHHSDHERH |
| NOV9g | TRQYHLQQLFYRYGENNSLSVEGFRKLLQNIGIDKIKRIHIHHDHDHHSDHEHHSDHERH |
| NOV9a | SDHEHHSEHEHHSDHDHHSHHNHAASGKNKRKALCPDHDSDSSGKDPRNSQGKGAHRPEH |
| NOV9b | SDHEHHSDHEHHSDHDHHSHHNHAASGKNKRKALCPDHDSDSSGKDPRNSQGKGAHRPEH |
| NOV9c | SDHEHHSDHEHHSDHDHHSHHNHAAFTEG-----------LSSGLST--SVAVFCHELPH |
| NOV9d | SDHEHHSDHHPHSHSQRYSREELKDAGVATLAWMVIMGDGLHNFSDG---LAIGAAFTEG |
| NOV9e | SDHEHHSDHEHHSDHDHHSHHNHAASGKNKRKALCPDHDSDSSGKDPRNSQGKGAHRPEH |
| NOV9f | SDHEHHSDHEHHSDHDHHSHHNHAASGKNKRKALCPDHDSDSSGKDPRNSQGKGAHRPEH |
| NOV9g | SDHEHHSDHEHHSDHDHHSHHNHAASGKNKRKALCPDHDSDSSGKDPRNSQGKGAHRPEH |
| NOV9a | ASGRRNVKDSVSASEVTSTVYNTVSEGTHFLETIETPRPG---KLFPKDVSSSTPPSVTS |
| NOV9b | ASGRRNVKDSVSASEVTSTVYNTVSEGTHFLETIETPRPG---KLFPKDVSSSTPPSVTS |
| NOV9c | ELGDFAVLLKAGMTVKQAVLYNALSAMLAYLGMATGIFIGHYAENVSMWIFALTAGLFMY |
| NOV9d | LSSG----LSTSVAVFCHELPHELGDFAVLLKAGMTVKQA---VLYNALSANLAYLGMAT |
| NOV9e | ASGRRNVKDSVSASEVTSTVYNTVSEGTHFLETIETPRPG---KLFPKDVSSSTPPSVTS |
| NOV9f | ASGRRNVKDSVSASEVTSTVYNTVSEGTHFLETIETPRPG---KLFPKDVSSSTPPSVTS |
| NOV9g | ASGRRNVKDSVSASEVTSTVYNTVSEGTHFLETIETPRPG---KLFPKDVSSSTPPSVTS |
| NOV9a | KSRVSRLAGRKTNESVSEPRKGFMYSRNTNENPQECFNASKLLTSHGMGIQVPLNATEFN |
| NOV9b | KSRVSRLAGRKTNESVSEPRKGFMYSRNTNENPQECFNASKLLTSHGMGIQVPLNATEFN |
| NOV9c | VALVDMVPEMLHNDASDHGCSHWGYFFLQNAGMLLGFGIMLLISIFEHKIVFRINFNSPS |
| NOV9d | GIFIGHYAENVSMWIFALTAGLFMHVALVDMVPEMLHNDASDHGCSRWGYFFLQNAGMLL |
| NOV9e | KSRVSRLAGRKTNESVSEPRKGFMYSRNTNENPQECFNASKLLTSHGMGIQVPLNATEFN |
| NOV9f | KSRVSRLAGRKTNESVSEPRKGFMYSRNTNENPQECFNASKLLTSHGMGIQVPLNATEFN |
| NOV9g | KSRVSRLAGRKTNESVSEPRKGFMYSRNTNENPQECFNASKLLTSHGMGIQVPLNATEFN |
| NOV9a | YLCPAIINQIDARSCLIHTSEKKAEIPPKTYSLQIAWVGGFIAISIISFLSLLGVILVPL |
| NOV9b | YLCPAIINQIDARSCLIHTSEKKAEIPPKTYSLQ-------------------------- |
| NOV9c | SPPPKPPSSQSQPALLSGGAERCRRRHSGLDGDNG------------------------- |
| NOV9d | GFGIMLLISIFEHKIVFRINF--------------------------------------- |
| NOV9e | YLCPAIINQIDARSCLIHTSEKKAEIPPKTYSLQIAWVGGFIAISIISFLSLLGVILVPL |
| NOV9f | YLCPAIINQIDARSCLIHTSEKKAEIPPKTYSLQIAWVGGFIAISIISFLSLLGVILVPL |
| NOV9g | YLCPAIINQIDARSCLIHTSEKKAEIPPKTYSLQIAWVGGFIAISIISFLSLLGVILVPL |
| NOV9a | MNRVFFKFLLSFLVALAVGTLSGDAFLHLLPHSHASHHHSHSHEEPAMEMKRGPLFSHLS |
| NOV9b | ------------------------------------------------------------ |
| NOV9c | ------------------------------------------------------------ |
| NOV9d | ------------------------------------------------------------ |
| NOV9e | MNRVFFKFLLSFLVALAVGTLSGDAFLHLLPHSHASHHHSHSHEEPAMEMKRGPLFSHLS |
| NOV9f | MNRVFFKFLLSFLVALAVGTLSGDAFLHLLPHSHASHHHSHSHEEPAMEMKRGPLFSHLS |
| NOV9g | MNRVFFKFLLSFLVALAVGTLSGDAFLHLLPHSHASHHHSHSHEEPAMEMKRGPLFSHLS |
| NOV9a | SQNIEESAYFDSTWKGLTALGGLYFMFLVEHVLTLIKQFKDKKKKNQKKPENDDDVEIKK |
| NOV9b | ------------------------------------------------------------ |
| NOV9c | ------------------------------------------------------------ |
| NOV9d | ------------------------------------------------------------ |
| NOV9e | SQNIEESAYFDSTWKGLTALGGLYFMFLVEHVLTLIKQFKDKKKKNQKKPENDDDVEIKK |
| NOV9f | SQNIEESAYFDSTWKGLTALGGLYFMFLVEHVLTLIKQFKDKKKKNQKKPENDDDVEIKK |
| NOV9g | SQNIEESAYFDSTWKGLTALGGLYFMFLVEHVLTLIKQFKDKKKKNQKKPENDDDVEIKK |
| NOV9a | QLSKYESQLSTNEEKVDTDDRTEGYLRADSQEPSHFDSQQPAVLEEEEVMIAHAHPQEVY |
| NOV9b | ------------------------------------------------------------ |
| NOV9c | ------------------------------------------------------------ |
| NOV9d | ------------------------------------------------------------ |
| NOV9e | QLSKYESQLSTNEEKVDTDDRTEGYLRADSQEPSHFDSQQPAVLEEEEVMIAHAHPQEVY |
| NOV9f | QLSKYESQLSTNEEKVDTDDRTEGYLRADSQEPSHFDSQQPAVLEEEEVMIAHAHPQEVY |
| NOV9g | QLSKYESQLSTNEEKVDTDDRTEGYLRADSQEPSHFDSQQPAVLEEEEVMIAHAHPQEVY |
| NOV9a | NEYVPRGCKNKCHSHFHDTLGQSDDLIHHHHDYHHILHHHHHQNHHPHSHSQRYSREELK |
| NOV9b | ------------------------------------------------------------ |
| NOV9c | ------------------------------------------------------------ |
| NOV9d | ------------------------------------------------------------ |
| NOV9e | NEYVPRGCKNKCHSHFHDTLGQSDDLIHHHHDYHHILHHHHHQNHHPHSHSQRYSREELK |
| NOV9f | NEYVPRGCKNKCHSHFHDTLGQSDDLIHHHHDYHHILHHHHHQNHHPHSHSQRYSREELK |
| NOV9g | NEYVPRGCKNKCHSHFHDTLGQSDDLIHHHHDYHHTLHHHHHQNHHPHSHSQRYSREELK |
| NOV9a | DAGVATLAWMVIMGDGLHNFSDGLAIGAAFTEGLSSGLSTSVAVFCHELPHELGDFAVLL |
| NOV9b | ------------------------------------------------------------ |
| NOV9c | ------------------------------------------------------------ |
| NOV9d | ------------------------------------------------------------ |
| NOV9e | DAGVATLAWMVIMGDGLHNFSDGLAIGAAFTEGLSSGLSTSVAVFCHELPHELGDFAVLL |
| NOV9f | DAGVATLAWMVIMGDGLHNFSDGLAIGAAFTEGLSSGLSTSVAVFCHELPHELGDFAVLL |
| NOV9g | DAGVATLAWMVIMGDGQHNFSDGLAIGDAFTEGLSSGLSTSVAVFCHELPHELGDFAVLL |
| NOV9a | KAGMTVKQAVLYNALSAMLAYLGMATGIFIGHYAENVSMWIFALTAGLFMYVALVDMVPE |
| NOV9b | ------------------------------------------------------------ |
| NOV9c | ------------------------------------------------------------ |
| NOV9d | ------------------------------------------------------------ |
| NOV9e | KAGMTVKQAVLYNALSAMLAYLGMATGIFIGHYAENVSMWIFALTAGLFMYVALVDMVPE |
| NOV9f | KAGMTVKQAVLYNALSAMLAYLGMATGIFIGHYAENVSMWIFALTAGLFMYVALVDMVPE |
| NOV9g | KAGMTVKQAVLYNALSAMLAYLGMATGIFIGHYAENVSMWIFALTAGLFMYVALVDMVPE |
| NOV9a | [sequence omitted] |
| NOV9b | ------------------------------------------------------------ |
| NOV9c | ------------------------------------------------------------ |
| NOV9d | ------------------------------------------------------------ |
| NOV9e | [sequence omitted] |
| NOV9f | [sequence omitted] |
| NOV9g | [sequence omitted] |
| NOV9a | (SEQ ID NO: 98) |
| NOV9b | (SEQ ID NO: 100) |
| NOV9c | (SEQ ID NO: 102) |
| NOV9d | (SEQ ID NO: 104) |
| NOV9e | (SEQ ID NO: 106) |
| NOV9f | (SEQ ID NO: 108) |
| NOV9g | (SEQ ID NO: 110) |

[0342] Further analysis of the NOV9g protein yielded the following properties shown in Table 9C.

TABLE 9C
Protein Sequence Properties NOV9g

| SignalP | No cleavage site detected | | | |
|---|---|---|---|---|
| analysis: | | | | |
| PSORT II | PSG: a new signal peptide prediction method | | | |
| analysis: | N-region: length 7; pos. chg 1; neg. chg 1 | | | |
| | H-region: length 8; peak value 3.45 | | | |
| | PSG score: −0.95 | | | |
| | GvH: von Heijne's method for signal seq. recognition | | | |
| | GvH score (threshold: −2.1): −10.58 | | | |
| | possible cleavage site: between 14 and 15 | | | |
| | >>> Seems to have no N-terminal signal peptide | | | |
| | ALOM: Klein et al's method for TM region allocation | | | |
| | Init position for calculation: 1 | | | |
| | Tentative number of TMS(s) for the threshold 0.5: 6 | | | |
| | INTEGRAL | Likelihood = | −11.15 | Transmembrane |
| | | | | 314-330 |
| | INTEGRAL | Likelihood = | −5.26 | Transmembrane |
| | | | | 336-352 |
| | INTEGRAL | Likelihood = | −1.59 | Transmembrane |
| | | | | 412-428 |
| | INTEGRAL | Likelihood = | −1.97 | Transmembrane |
| | | | | 646-662 |
| | INTEGRAL | Likelihood = | −4.73 | Transmembrane |
| | | | | 671-687 |
| | INTEGRAL | Likelihood = | −3.98 | Transmembrane |
| | | | | 713-729 |
| | PERIPHERAL | Likelihood = | 3.45 (at 628) | |
| | ALOM score: −11.15 (number of TMSs: 6) | | | |
| | MTOP: Prediction of membrane topology (Hartmann et al.) | | | |
| | Center position for calculation: 321 | | | |
| | Charge difference: 0.5 C(2.0)-N(1.5) | | | |
| | C > N: C-terminal side will be inside | | | |
| | >>> membrane topology: type 3b | | | |
| | MITDISC: discrimination of mitochondrial targeting seq | | | |
| | R content: | 0 | Hyd Moment(75): | 6.50 |
| | Hyd Moment(95): | 9.58 | G content: | 1 |
| | D/E content: | 2 | S/T content: | 3 |

Score: −6.16
Gavel: prediction of cleavage sites for mitochondrial preseq
cleavage site motif not found
NUCDISC: discrimination of nuclear localization signals
pat4: KKKK (5) at 432
pat7: none
bipartite: none
content of basic residues: 9.1%
NLS Score: −0.16
NNCN: Reinhardt's method for Cytplasmic/Nuclear discrimination
Prediction: cytoplasmic
Reliability: 55.5
Psort Results (see Details):
60.0%: plasma membrane
40.0%: Golgi body
30.0%: endoplasmic reticulum (membrane)
30.0%: microbody (peroxisome)
Psort II Results (see Details):
33.3%: endoplasmic reticulum
22.2%: vacuolar
11.1%: Golgi
11.1%: nuclear
11.1%: vesicles of secretory system
11.1%: mitochondrial

[0343] A search of the NOV9g protein against the Geneseq database, a proprietary database that contains sequences published in patents and patent publication, yielded several homologous proteins shown in Table 9D.

TABLE 9D
Geneseq Results for NOV9g

| | | | Identities/ | |
|---|---|---|---|---|
| | | Residues/ | Similarities for | |
| | | Match | the Matched | |
| Identifier | Date] | Residues | Region | Value |
| ABG76949 | Human protein, homologous to LIV-1, | 1 . . . 733 | 733/733 (99%) | 0.0 |
| | designated NOV1 - Homo sapiens, 755 | 1 . . . 753 | 736/738 (99%) | |
| | aa. [WO200255705-A2, 18 JUL. 2002] | | | |
| ABR48228 | Human bladder cancer associated protein | 1 . . . 733 | 733/733 (99%) | 0.0 |
| | sequence SEQ ID NO: 177 - Homo | 1 . . . 753 | 736/738 (99%) | |
| | sapiens, 755 aa. [WO2003003906-A2, | | | |
| | 16 JAN. 2003] | | | |
| ABU56608 | Lung cancer-associated polypeptide #201 - | 1 . . . 733 | 733/733 (99%) | 0.0 |
| | Unidentified, 755 aa. | 1 . . . 753 | 736/738 (99%) | |
| | [WO200286443-A2, 31 OCT. 2002] | | | |
| AAM51198 | Human breast cancer 4 gene | 1 . . . 733 | 733/733 (99%) | 0.0 |
| | (BCR4)-encoded protein - Homo sapiens, | 1 . . . 753 | 736/738 (99%) | |
| | 755 aa. [WO200216939-A2, | | | |
| | 28 FEB. 2002] | | | |
| ABG61889 | Prostate cancer-associated protein #90 - | 1 . . . 733 | 733/733 (99%) | 0.0 |
| | Mammalia, 755 aa. [WO200230268-A2, | 1 . . . 753 | 736/738 (99%) | |
| | 18 APR. 2002] | | | |

[0344] In a BLAST search of public sequence databases, the NOV9g protein was found to have homology to the proteins shown in the BLASTP data in Table 9E.

TABLE 9E
Public BLASTP Results for NOV9g

| | | NOV9g | Identities/ | |
|---|---|---|---|---|
| Protein | | Residues/ | Similarities for | |
| Accession | | Match | the Matched | Expect |
| Number | Protein/Organism/Length | Residues | Portion | Value |
| CAD42374 | Sequence 1 from Patent | 1 . . . 733 | 752/753 (99%) | 0.0 |
| | WO0216939 - Homo sapiens | 1 . . . 753 | 753/753 (99%) | |
| | (Human), 755 aa. | | | |
| Q13433 | Estrogen regulated LIV-1 protein - | 1 . . . 733 | 727/735 (98%) | 0.0 |
| | Homo sapiens (Human), 749 aa. | 19 . . . 747 | 730/736 (98%) | |
| G02273 | LIV-1 protein - human, 752 aa. | 1 . . . 733 | 729/736 (98%) | 0.0 |
| | | 19 . . . 747 | 730/736 (98%) | |

[0345] PFam analysis predicts that the NOV9g protein contains the domains shown in the Table 9F. Specific amino acid residues of NOV9g for each domain is shown in column 2, equivalent domains in the other NOV9 proteins of the invention are also encompassed herein.

TABLE 9F
Domain Analysis of NOV9g

| | NOV11g Match Region | | |
|---|---|---|---|
| Pfam Domain | Amino Acid Residues: | Score | Expect Value |
| Zip | 301−725 | 443.7 | 1.6e−129 |

### Example 10

### NOV10, CG59356, Nuclear Receptor Subfamily 4

[0346] The NOV10 clone was analyzed, and the nucleotide and encoded polypeptide sequences are shown in Table 10A.

TABLE 10A

NOV10 Sequence Analysis

| | | |
|---|---|---|
| NOV10a, CG59356-01 | SEQ ID NO: 115 | 3802 bp |
| DNA Sequence | ORF Start: ATG at 732 | ORF Stop: TAA at 2610 |

ATAAATGACGTGCCGAGAGAGCGAGCGAACGCGCAGCCGGGAGAGCGGAGTCTCCTGCCTCCCGCCCCCCACC
CCTCCAGCTCCTGCTCCTCCTCCGCTCCCCATACACAGACGCGCTCACACCCGCTCCCTCACTCGAACACACA
GACACAAGCGCGCACACAGGCTCCGCACACACACACTTCGCTCTCCCGCGCGCTCACACCCCTCTTGCCCTGA
GCCCTTGCCGGTGCAGCGCGGCGCCGCAGCTGGACGCCCCTCCCGGGCTCACTTTGCAACGCTGACGGTGCCG
GCAGTGGCCGTGGAGGTGGGAACAGCGGCGGCATCCTCCCCCCTGGTCACAGCCCAAGCCAGGACGCCCGCGG
AACCTCTCGGCTGTGCTCTCCCATGAGTCGGGATCGCAGCATCCCCCACCAGCCGCTCACCGCCTCCGGGAGC
CGCTGGGCTTGTACACCGCAGCCCTTCCGGGACAGCAGCTGTGACTCCCCCCCAGTGCAGATTTCGGGACAGC
TCTCTAGAAACTCGCTCTAAAGACGGAACCGCCACAGCACTCAAAGCCCACTGCGGAAGAGGGCAGCCCGGCA
AGCCCGGGCCCTGAGCCTGGACCCTTAGCGGTGCCGGGCAGCACTGCCGGCGCTTCGCCTCGCCGGACGTCCG
CTCCTCCTACACTCTCAGCCTCCGCTGGAGAGACCCCCAGCCCCACCATTCAGCGCGCAAGATACCCTCCAGA
TATGCCCTGCGTCCAAGCCCAATATAGCCCTTCCCCTCCAGGTTCCAGTTATGCGGCGCAGACATACAGCTCG
GAATACACCACGGAGATCATGAACCCCGACTACACCAAGCTGACCATGGACCTTGGCAGCACTGAGATCACGG
CTACAGCCACCACGTCCCTGCCCAGCATCAGTACCTTCGTGGAGGGCTACTCGAGCAACTACGAACTCAAGCC
TTCCTGCGTGTACCAAATGCAGCGGCCCTTGATCAAAGTGGAGGAGGGGCGGGCGCCCAGCTACCATCACCAT
CACCACCACCACCACCACCACCACCACCATCACCAGCAGCAGCATCAGCAGCCATCCATTCCTCCAGCCTCCA
GCCCGGAGGACGAGGTGCTGCCCAGCACCTCCATGTACTTCAAGCAGTCCCCACCGTCCACCCCCACCACGCC
GGCCTTCCCCCCGCAGGCGGGGGCGTTATGGGACGAGGCACTGCCCTCGGCGCCCGGCTGCATCGCACCCGGC
CCGCTGCTGGACCCGCCGATGAAGGCGGTCCCCACGGTGGCCGGCGCGCGCTTCCCGCTCTTCCACTTCAAGC
CCTCGCCGCCGCATCCCCCCGCGCCCAGCCCGGCCGGCGGCCACCACCTCGGCTACGACCCGACGGCCGCTGC
CGCGCTCAGCCTGCCGCTGGGAGCCGCAGCCGCCGCGGGCAGCCAGGCCGCCGCGCTTGAGGGCCACCCGTAC
GGGCTGCCGCTGGCCAAGAGGGCGGCCCCGCTGGCCTTCCCGCCTCTCGGCCTCACGCCCTCCCCTACCGCGT
CCAGCCTGCTGGGCGAGAGTCCCAGCCTGCCGTCGCCGCCCAGCAGGAGCTCGTCGTCTGGCGAGGGCACGTG
TGCCGTGTGCGGGGACAACGCCGCCTGCCAGCACTACGGCGTGCGAACCTGCGAGGGCTGCAAGGGCTTTTTC
AAGAGAACAGTGCAGAAAAATGCAAAATATGTTTGCCTGGCAAATAAAAACTGCCCAGTAGACAAGAGACGTC
GAAACCGATGTCAGTACTGTCGATTTCAGAAGTGTCTCAGTGTTGGAATGGTAAAAGAAGTTGTCCGTACAGA
TAGTCTGAAAGGGAGGAGAGGTCGTCTGCCTTCCAAACCAAAGAGCCCATTACAACAGGAACCTTCTCAGCCC
TCTCCACCTTCTCCTCCAATCTGCATGATGAATGCTCTTGTCCGAGCTTTAACAGACTCAACACCCAGAGATC
TTGATTATTCCAGATACTGTCCCACTGACCAGGCTGCTGCAGGCACAGATGCTGAGCATGTGCAACAATTCTA
CAACCTCCTGACAGCCTCCATTGATGTATCCAGAAGCTGGGCAGAAAGGATTCCGGGATTTACTGATCTCCCC
AAAGAAGATCAGACATTACTTATTGAATCAGCCTTTTTGGAGCTGTTTGTCCTCAGACTTTCCATCAGGTCAA
ACACTGCTGAAGATAAGTTTGTGTTCTGCAATGGACTTGTCCTGCATCGACTTCAGTGCCTTCGTGGATTTGG
GGAGTGGCTCGACTCTATTAAAGACTTTTCCTTAAATTTGCAGAGCCTGAACCTTGATATCCAAGCCTTAGCC
TGCCTGTCAGCACTGAGCATGATCACAGAAAGACATGGGTTAAAAGAACCAAAGAGAGTCGAAGAGCTATGCA
ACAAGATCACAAGCAGTTTAAAAGACCACCAGAGTAAGGGACAGGCTCTGGAACCCAACGAGTCCAAGGTCCT
GGTTGCCCTGGTAGAACTGAGGAAGATCTGCACCCTGGGCCTCCAGCGCATCTTCTACCTGAAGCTGGAAGAC
TTGGTGTCTCCACCTTCCATCATTGACAAGCTCTTCCTGGACACCCTACCTTTCTAATCAGGAGCAGTGGAGC
AGTGAGCTGCCTCCTCTCCTAGCACCCTGCTTCTACGCAGCAAAGGGATAGGTTTGGAAACCTATCATTTCCT
GTCCTTCCTTAAGAGGAAAAGCAGCTCCTGTAGAAAGCAAAGACTTTCTTTTTTTTCTGGCTCTTTTCCTTAC
AACCTAAAGCCAGAAAACTTGCAGAGTATTGTGTTGGGGTTGTGTTTTATATTTAGGCATTGGGGGATGGGGT
GGGAGGGGGTTATAGTTCATGAGGGTTTTCTAAGAAATTGCTAACAAAGCACTTTTGGACAATGCTATCCCAG
CAGGAAAAAAAAGGATAATATAACTGTTTTAAAACTCTTTCTGGGGAATCCAATTATAGTTGCTTTGTATTTA
AAAACAAGAACAGCCAAGGGTTGTTCGCCAGGGTAGGATGTGTCTTAAAGATTGGTCCCTTGAAAATATGCTT
CCTGTATCAAAGGTACGTATGTGGTGCAAACAAGGCAGAAACTTCCTTTTAATTTCCTTCTTCCTTTATTTTA
ACAAATGGTGAAAGATGGAGGATTACCTACAAATCAGACATGGCAAAACAATAATGGCTGTTTGCTTCCATAA
ACAAGTGCAATTTTTTAAAGTGCTGTCTTACTAAGTCTTGTTTATTAACTCTCCTTTATTCTATATGGAAATA
AAAAGGAGGCAGTCATGTTAGCAAATGACACGTTAATATCCCTAGCAGAGGCTGTGTTCACCTTCCCTGTCGA
TCCCTTCTGAGGTATGGCCCATCCAAGACTTTTAGGCCATTCTTGATGGAACCAGATCCCTGCCCTGACTGTC
CAGCTATCCTGAAAGTGGATCAGATTATAAACTGGATTACATGTAACTGTTTTGGTTGTGTTCTATCAACCCC
ACCAGAGTTCCCTAAACTTGCTTCAGTTATAGTAACTGACTGGTATATTCATTCAGAAGCGCCATAAGTCAGT
TGAGTATTTGATCCCTAGATAAGAACATGCAAATCAGCAGGAACTGGTCATACAGGGTAAGCACCAGGGACAA
TAAGGATTTTTATAGATATAATTTAATTTTTGGTAATTGGGTTAAGGAGACCAATTTTGGAGAGCAAGCAAAT
CTTCTTTTTAAAAAATAGTATGAATGTGAATACTAGAAAAGATTTAAGAAATAGTATGAGTGTGAGTACTAGG
AAGGAT

| | | | |
|---|---|---|---|
| NOV10a, CG59356-01 | | | |
| Protein Sequence | SEQ ID NO: 116 | 626 aa | MW at 68281.9kD |

| | |
|---|---|
| MPCVQAQYSPSPPGSSYAAQTYSSEYTTEIMNPDYTKLTMDLGSTEITATATTSLPSISTFVEGYSSMYELKP | +TL,46 |
| SCVYQMQRPLIKVEEGRAPSYHHHHHHHHHHHHHHQQQHQQPSIPPASSPEDEVLPSTSMYFKQSPPSTPTTP | |
| AFPPQAGALWDEALPSAPGCIAPGPLLDPPMKAVPTVAGARFPLFHFKPSPPHPPAPSPAGGHHLGYDPTAAA | |
| ALSLPLGAAAAAGSQAAALEGHPYGLPLAKRAAPLAFPPLGLTPSPTASSLLGESPSLPSPPSRSSSSGEGTC | |
| AVCGDNAACQHYGVRTCEGCKGFFKRTVQKNAKYVCLANKNCPVDKRRRNRCQYCRFQKCLSVGMVKEVVRTD | |
| SLKGRRGRLPSKPKSPLQQEPSQPSPPSPPICMMNALVRALTDSTPRDLDYSRYCPTDQAAAGTDAEHVQQFY | |
| NLLTASIDVSRSWAERIPGFTDLPKEDQTLLIESAFLELFVLRLSIRSNTAEDKFVFCNGLVLHRLQCLRGFG | |
| EWLDSIKDFSLNLQSLNLDIQALACLSALSMITERHGLKEPKRVEELCNKITSSLKDHQSKGQALEPNESKVL | |
| VALVELRKICTLGLQRIFYLKLEDLVSPPSIIDKLFLDTLPF | |

[0347] Further analysis of the NOV10a protein yielded the following properties shown in Table 10B.

TABLE 10B
Protein Sequence Properties NOV10a

| SignalP | No Known Signal Sequence Predicted | | | |
|---|---|---|---|---|
| analysis: | | | | |
| PSORT II | PSG: a new signal peptide prediction method | | | |
| analysis: | N-region: length 0; pos. chg 0; neg. chg 0 | | | |
| | H-region: length 24; peak value 2.26 | | | |
| | PSG score: −2.14 | | | |
| | GvH: von Heijne's method for signal seq. recognition | | | |
| | GvH score (threshold: −2.1): −6.85 | | | |
| | possible cleavage site: between 60 and 61 | | | |
| | >>> Seems to have no N-terminal signal peptide | | | |
| | ALOM: Klein et al's method for TM region allocation | | | |
| | Init position for calculation: 1 | | | |
| | Tentative number of TMS(s) for the threshold 0.5: 1 | | | |
| | Number of TMS(s) for threshold 0.5: 0 | | | |
| | PERIPHERAL Likelihood = 0.63 (at 527) | | | |
| | ALOM score: −1.81 (number of TMSs: 0) | | | |
| | MITDISC: discrimination of mitochondrial targeting seq | | | |
| | R content: | 0 | Hyd Moment(75): | 0.70 |
| | Hyd Moment(95): | 0.43 | G content: | 1 |
| | D/E content: | 1 | S/T content: | 7 |

```
Score: −4.77
Gavel: prediction of cleavage sites for mitochondrial preseq
cleavage site motif not found
NUCDISC: discrimination of nuclear localization signals
pat4: KRRR (5) at 338
pat7: PVDKRRR (5) at 335
bipartite: none
content of basic residues: 9.4%
NLS Score: 0.27
checking 63 PROSITE DNA binding motifs:
Nuclear hormones receptors DNA-binding region signature (PS00031):
*** found ***
CAVCGDNAACQHYGVRTCEGCKGFFKR at 292
Leucine zipper pattern (PS00029): *** found ***
LPKEDQTLLIESAFLELFVLRL at 461
NNCN: Reinhardt's method for Cytoplasmic/Nuclear discrimination
Prediction: nuclear
Reliability: 94.1
Final Results (k = 9/23):
87.0%: nuclear
  4.3%: peroxisomal
  4.3%: cytoplasmic
  4.3%: mitochondrial
>> prediction for CG59356-01 is nuc (k = 23)
```

[0348] A search of the NOV10a protein against the Geneseq database, a proprietary database that contains sequences published in patents and patent publication, yielded several homologous proteins shown in Table 10C.

TABLE 10C
Geneseq Results for NOV10a

| | | NOV10a | Identities/ | |
|---|---|---|---|---|
| | | Residues/ | Similarities for | |
| Geneseq | Protein/Organism/Length [Patent #, | Match | the Matched | Expect |
| Identifier | Date] | Residues | Region | Value |
| AAW16398 | Human neuron-derived orphan receptor | 1 . . . 626 | 623/626 (99%) | 0.0 |
| | NOR-1 protein - Homo sapiens, 626 aa. | 1 . . . 626 | 624/626 (99%) | |
| | [JP09084585-A, 31 MAR. 1997] | | | |
| AAU96995 | Human nuclear receptor NOR1 protein | 1 . . . 626 | 625/626 (99%) | 0.0 |
| | sequence - Homo sapiens, 625 aa. | 1 . . . 625 | 625/626 (99%) | |
| | [WO200187923-A1, 22 NOV. 2001] | | | |
| ABB98438 | Murine Neural Orphan Receptor 1, | 1 . . . 626 | 579/631 (91%) | 0.0 |
| | NOR1, #2 - Mus musculus, 628 aa. | 1 . . . 628 | 592/631 (93%) | |
| | [WO200246391-A2, 13 JUN. 2002] | | | |
| AAR92057 | Apoptopic cerebral neuron nuclear | 1 . . . 626 | 579/631 (91%) | 0.0 |
| | receptor protein - Rattus norvegicus, | 1 . . . 628 | 592/631 (93%) | |
| | 628 aa. [JP08023980-A, 30 JAN. 1996] | | | |
| ABB98437 | Murine Neural Orphan Receptor 1, | 1 . . . 626 | 577/631 (91%) | 0.0 |
| | NOR1, #1 - Mus musculus, 627 aa. | 1 . . . 627 | 591/631 (93%) | |
| | [WO200246391-A2, 13 JUN. 2002] | | | |

[0349] In a BLAST search of public sequence databases, the NOV12a protein was found to have homology to the proteins shown in the BLASTP data in Table 12D.

TABLE 10D
Public BLASTP Results for NOV10a

| | | NOV10a | Identities/ | |
|---|---|---|---|---|
| Protein | | Residues/ | Similarities for | |
| Accession | | Match | the Matched | Expect |
| Number | Protein/Organism/Length | Residues | Portion | Value |
| Q92570 | Nuclear hormone receptor NOR-1 | 1 . . . 626 | 623/626 (99%) | 0.0 |
| | (Neuron-derived orphan receptor 1) | 1 . . . 626 | 624/626 (99%) | |
| | (Mitogen induced nuclear orphan | | | |
| | receptor) - Homo sapiens (Human), 626 | | | |
| | aa. | | | |
| S71930 | neuron-derived receptor NOR-1 - human, | 1 . . . 626 | 625/626 (99%) | 0.0 |
| | 625 aa. | 1 . . . 625 | 625/626 (99%) | |
| O97726 | Neuron-derived orphan receptor-1 alfa - | 1 . . . 626 | 593/643 (92%) | 0.0 |
| | Sus scrofa (Pig), 643 aa. | 1 . . . 643 | 604/643 (93%) | |
| P51179 | Nuclear hormone receptor NOR-1 | 1 . . . 626 | 579/631 (91%) | 0.0 |
| | (Neuron-derived orphan receptor 1) - | 1 . . . 628 | 592/631 (93%) | |
| | Rattus norvegicus (Rat), 628 aa. | | | |
| Q9QZB6 | Orphan nuclear receptor TEC long | 1 . . . 626 | 577/631 (91%) | 0.0 |
| | isoform - Mus musculus (Mouse), 627 aa. | 1 . . . 627 | 591/631 (93%) | |

[0350] PFam analysis predicts that the NOV10a protein contains the domains shown in the Table 10E.

TABLE 10E
Domain Analysis of NOV10a

| | | Identities/ | |
|---|---|---|---|
| | | Similarities | |
| | NOV12a Match Region | for the | Expect |
| Pfam Domain | Amino Acid Residues: | Matched Region | Value |
| zf-C4 | 290 . . . 365 | 49/77 (64%) | 2.2e−51 |
| | | 70/77 (91%) | |
| hormone_rec | 442 . . . 620 | 53/206 (26%) | 2.4e−33 |
| | | 142/206 (69%) | |

### Example 11

### NOV11 CG59889, KIAA1199 and KIAA1199 Extension

[0351] The NOV11 clone was analyzed, and the nucleotide and encoded polypeptide sequences are shown in Table 11A.

TABLE 11A
NOV11 Sequence Analysis

| | | |
|---|---|---|
| NOV11a, CG59889-04 | SEQ ID NO: 117 | 3864 bp |
| DNA Sequence | ORF Start: at 2 | ORF Stop: TGA at 3815 |

GTGCCCTGACCAGAGCCCTGAGTTGCAACCCTGGAACCCTGGCCATGACCAAGACCACCATGTGCATATCGGC
CAGGGCAAGACACTGCTGCTCACCTCTTCTGCCACGGTCTATTCCATCCACATCTCAGAGGGAGGCAAGCTGG
TCATTAAAGACCACGACGAGCCGATTGTTTTGCGAACCCGGCACATCCTGATTGACAACGGAGGAGAGCTGCA
TGCTGGGAGTGCCCTCTGCCCTTTCCAGGGCAATTTCACCATCATTTTGTATGGAAGGGCTGATGAAGGTATT
CAGCCGGATCCTTACTATGGTCTGAAGTACATTGGGGTTGGTAAAGGAGGCGCTCTTGAGTTGCATGGACAGA
AAAAGCTCTCCTGGACATTTCTGAACAAGACCCTTCACCCAGGTGGCATGGCAGAAGGAGGCTATTTTTTTGA
AAGGAGCTGGGGCCACCGTGGAGTTATTGTTCATGTCATCGACCCCAAATCAGGCACAGTCATCCATTCTGAC
CGGTTTGACACCTATAGATCCAAGAAAGAGAGTGAACGTCTGGTCCAGTATTTGAACGCGGTGCCCGATGGCA
GGATCCTTTCTGTTGCAGTGAATGATGAAGGTTCTCGAAATCTGGATGACATGGCCAGGAAGGCGATGACCAA
ATTGGGAAGCAAACACTTCCTGCACCTTGGATTTAGGGTGGAGTGGACGGAGTGGTTCGATCATGATAAAGTA
TCTCAGACTAAAGGTGGGGAGAAAATTTCAGACCTCTGGAAAGCTCACCCAGGAAAAATATGCAATCGTCCCA
TTGATATACAGCAGGCCACTACAATGGATGGAGTTAACCTCAGCACCGAGGTTGTCTACAAAAAAGGCCAGGA
TTATAGGTTTGCTTGCTACGACCGGGGCAGAGCCTGCCGGAGCTACCGTGTACGGTTCCTCTGTGGGAAGCCT
GTGAGGCCCAAACTCACAGTCACCATTGACACCAATGTGAACAGCACCATTCTGAACTTGGAGGATAATGTAC
AGTCATGGAAACCTGGAGATACCCTGGTCATTGCCAGTACTGATTACTCCATGTACCAGGCAGAAGAGTTCCA
GGTGCTTCCCTGCAGATCCTGCGCCCCCAACCAGGTCAAAGTGGCAGGGAAACCAATGTACCTGCACATCGGG
GAGGAGATAGACGGCGTGGACATGCGGGCGGAGGTTGGGCTTCTGAGCCGGAACATCATAGTGATGGGGGAGA
TGGAGGACAAATGCTACCCCTACAGAAACCACATCTGCAATTTCTTTGACTTCGATACCTTTGGGGGCCACAT
CAAGTTTGCTCTGGGATTTAAGGCAGCACACTTGGAGGGCACGGAGCTGAAGCATATGGGACAGCAGCTGGTG
GGTCAGTACCCGATTCACTTCCACCTGGCCGGTGATGTAGACGAAAGGGGAGGTTATGACCCACCCACATACA
TCAGGGACCTCTCCATCCATCATACATTCTCTCGCTGCGTCACAGTCCATGGCTCCAATGGCTTGTTGATCAA
GGACGTTGTGGGCTATAACTCTTTGGGCCACTGCTTCTTCACGGAAGATGGGCCGGAGGAACGCAACACTTTT
GACCACTGTCTTGGCCTCCTTGTCAAGTCTGGAACCCTCCTCCCCTCGGACCGTGACAGCAAGATGTGCAAGA
TGATCACAGAGGACTCCTACCCAGGGTACATCCCCAAGCCCAGGCAAGACTGCAATGCTGTGTCCACCTTCTG
GATGGCCAATCCCAACAACAACCTCATCAACTGTGCCGCTGCAGGATCTGAGGAAACTGGATTTTGGTTTATT
TTTCACCACGTACCAACGGGCCCCTCCGTGGGAATGTACTCCCCAGGTTATTCAGAGCACATTCCACTGGGAA
AATTCTATAACAACCGAGCACATTCCAACTACCGGGCTGGCATGATCATAGACAACGGAGTCAAAACCACCGA
GGCCTCTGCCAAGGACAAGCGGCCGTTCCTCTCAATCATCTCTGCCAGATACAGCCCTCACCAGGACGCCGAC
CCGCTGAAGCCCCGGGAGCCGGCCATCATCAGACACTTCATTGCCTACAAGAACCAGGACCACGGGGCCTGGC
TGCGCGGCGGGGATGTGTGGCTGGACAGCTGCCGGTTTGCTGACAATGGCATTGGCCTGACCCTGGCCAGTGG
TGGAACCTTCCCGTATGACGACGGCTCCAAGCAAGAGATAAAGAACAGCTTGTTTGTTGGCGAGAGTGGCAAC
GTGGGGACGGAAATGATGGACAATAGGATCTGGGGCCCTGGCGGCTTGGACCATAGCGGAAGGACCCTCCCTA
TAGGCCAGAATTTTCCAATTAGAGGAATTCAGTTATATGATGGCCCCATCAACATCCAAAACTGCACTTTCCG
AAAGTTTGTGGCCCTGGAGGGCCGGCACACCAGCGCCCTGGCCTTCCGCCTGAATAATGCCTGGCAGAGCTGC
CCCCATAACAACGTGACCGGCATTGCCTTTGAGGACGTTCCGATTACTTCCAGAGTGTTCTTCGGAGAGCCTG
GGCCCTGGTTCAACCAGCTGGACATGGATGGGGATAAGACATCTGTGTTCCATGACGTCGACGGCTCCGTGTC
CGAGTACCCTGGCTCCTACCTCACGAAGAATGACAACTGGCTGGTCCGGCACCCAGACTGCATCAATGTTCCC
GACTGGAGAGGGGCCATTTGCAGTGGGTGCTATGCACAGATGTACATTCAAGCCTACAAGACCAGTAACCTGC
GAATGAAGATCATCAAGAATGACTTCCCCAGCCACCCTCTTTACCTGGAGGGGGCGCTCACCAGGAGCACCCA
TTACCAGCAATACCAACCGGTTGTCACCCTGCAGAAGGGCTACACCATCCACTGGGACCAGACGGCCCCCGCC
GAACTCGCCATCTGGCTCATCAACTTCAACAAGGGCGACTGGATCCGAGTGGGGCTCTGCTACCCGCGAGGCA
CCACATTCTCCATCCTCTCGGATGTTCACAATCGCCTGCTGAAGCAAACGTCCAAGACGGGCGTCTTCGTGAG
GACCTTGCAGATGGACAAAGTGGAGCAGAGCTACCCTGGCAGGAGCCACTACTACTGGGACGAGGACTCAGGG
CTGTTGTTCCTGAAGCTGAAAGCTCAGAACGAGAGAGAGAAGTTTGCTTTCTGCTCCATGAAAGGCTGTGAGA
GGATAAAGATTAAAGCTCTGATTCCAAAGAACGCAGGCGTCAGTGACTGCACAGCCACAGCTTACCCCAAGTT
CACCGAGAGGGCTGTCGTAGACGTGCCGATGCCCAAGAAGCTCTTTGGTTCTCAGCTGAAAACAAAGGACCAT
TTCTTGGAGGTGAAGATGGAGAGTTCCAAGCAGCACTTCTTCCACCTCTGGAACGACTTCGCTTACATTGAAG
TGGATGGGAAGAAGTACCCCAGTTCGGAGGATGGCATCCAGGTGGTGGTGATTGACGGGAACCAAGGGCGCGT
GGTGAGCCACACGAGCTTCAGGAACTCCATTCTGCAAGGCATACCATGGCAGCTTTTCAACTATGTGGCGACC
ATCCCTGACAATTCCATAGTGCTTATGGCATCAAAGGGAAGATACGTCTCCAGAGGCCCATGGACCAGAGTGC
TGGAAAAGCTTGGGGCAGACAGGGGTCTCAAGTTGAAAGAGCAAATGGCATTCGTTGGCTTCAAAGGCAGCTT
CCGGCCCATCTGGGTGACACTGGACACTGAGGATCACAAAGCCAAAATCTTCCAAGTTGTGCCCATCCCTGTG
GTGAAGAAGAAGAAGTTGTGAGGACAGCTGCCGCCCGGTGCCACCTCGTGGTAGACTATGACGGTGAC

| | | | |
|---|---|---|---|
| NOV11a, CG59889-04 | | | |
| Protein Sequence | SEQ ID NO: 118 | 1271 aa | MW at 143122.4kD |

CPDQSPELQPWNPGHDQDHHVHIGQGKTLLLTSSATVYSIHISEGGKLVIKDHDEPIVLRTRHILIDNGGELH
AGSALCPFQGNFTIILYGRADEGIQPDPYYGLKYIGVGKGGALELHGQKKLSWTFLNKTLEPGGMAEGGYFFE
RSWGHRGVIVHVIDPKSGTVIHSDRFDTYRSKKESERLVQYLNAVPDGRILSVAVNDEGSRNLDDMARKAMTK
LGSKHFLHLGFRVEWTEWFDHDKVSQTKGGEKISDLWKAHPGKICNRPIDIQQATTMDGVNLSTEVVYKKGQD
YRFACYDRGRACRSYRVRFLCGKPVRPKLTVTIDTNVNSTILNLEDNVQSWKPGDTLVIASTDYSMYQAEEFQ
VLPCRSCAPNQVKVAGKPMYLHIGEEIDGVDMRAEVGLLSRNIIVMGEMEDKCYPYRNHICNFFDFDTFGGHI
KFALGFKAAHLEGTELKHMGQQLVGQYPIHFHLAGDVDERGGYDPPTYIRDLSIHHTFSRCVTVHGSNGLLIK
DVVGYNSLGHCFFTEDGPEERNTFDHCLGLLVKSGTLLPSDRDSKMCKMITEDSYPGYIPKPRQDCNAVSTFW
MANPNNNLINCAAAGSEETGFWFIFHHVPTGPSVGMYSPGYSEHIPLGKFYNNRAHSNYRAGMIIDNGVKTTE
ASAKDKRPFLSIISARYSPHQDADPLKPREPAIIRHFIAYKNQDHGAWLRGGDVWLDSCRFADNGIGLTLASG
GTFPYDDGSKQEIKNSLFVGESGNVGTEMMDNRIWGPGGLDHSGRTLPIGQNFPIRGIQLYDGPINIQNCTFR
KFVALEGRHTSALAFRLNNAWQSCPHNNVTGIAFEDVPITSRVFFGEPGPWFNQLDMDGDKTSVFHDVDGSVS
EYPGSYLTKNDNWLVRHPDCINVPDWRGAICSGCYAQMYIQAYKTSNLRMKIIKNDFPSHPLYLEGALTRSTH
YQQYQPVVTLQKGYTIHWDQTAPAELAIWLINFNKGDWIRVGLCYPRGTTFSILSDVHNRLLKQTSKTGVFVR
TLQMDKVEQSYPGRSHYYWDEDSGLLFLKLKAQNEREKFAFCSMKGCERIKIKALIPKNAGVSDCTATAYPKF
TERAVVDVPMPKKLFGSQLKTKDHFLEVKMESSKQHFFHLWNDFAYIEVDGKKYPSSEDGIQVVVIDGNQGRV
VSHTSFRNSILQGIPWQLFNYVATIPDNSIVLMASKGRYVSRGPWTRVLEKLGADRGLKLKEQMAFVGFKGSF
RPIWVTLDTEDHKAKIFQVVPIPVVKKKKL

| | | |
|---|---|---|
| NOV11b, CG59889-01 | SEQ ID NO: 119 | 4205 bp |
| DNA Sequence | ORF Start: ATG at 22 | ORF Stop: TGA at 4156 |

ATTAATGAATATAAAATTATTATGTACTACACAATTAGTAGAAAGCATATTTTAGAGACACACCTGCCGCAAA
ATACTCAGTCAAGGGAAGGGGCGGGTCCGAATCCAGGGGCGACGCCGCCGCCTCCGCCAGTGCCCCGGGCGTC
CCGCCGCCTCACTAAGCGCCTGGAGCGCGAGGATCGCTCCACTGCACTCCAGCCTGGGCAACAGAGCGAGACT
CTGTCTCAAAAAAAAAAAAGAAGTAAAAATAATTATGCAGTATGTTTAGACATTTTAATATTTGTTTTGATTT
CATTTTTTCTTCCCTTAAAAACACCCCTTGGGGAGACTTCGGCTGCTGGGTGCCCTGACCAGAGCCCTGAGTT
GCAACCCTGGAACCCTGGCCATGACCAAGACCACCATGTGCATATCGGCCAGGGCAAGACACTGCTGCTCACC
TCTTCTGCCACGGTCTATTCCATCCACATCTCAGAGGGAGGCAAGCTGGTCATTAAAGACCACGACGAGCCGA
TTGTTTTGCGAACCCGGCACATCCTGATTGACAACGGAGGAGAGCTGCATGCTGGGAGTGCCCTCTGCCCTTT
CCAGGGCAATTTCACCATCATTTTGTATGGAAGGGCTGATGAAGGTATTCAGCCGGATCCTTACTATGGTCTG
AAGTACATTGGGGTTGGTAAAGGAGGCGCTCTTGAGTTGCATGGACAGAAAAAGCTCTCCTGGACATTTCTGA
ACAAGACCCTTCACCCAGGTGGCATGGCAGAAGGAGGCTATTTTTTTGAAAGGAGCTGGGGCCACCGTGGAGT
TATTGTTCATGTCATCGACCCCAAATCAGGCACAGTCATCCATTCTGACCGGTTTGACACCTATAGATCCAAG
AAAGAGAGTGAACGTCTGGTCCAGTATTTGAACGCGGTGCCCGATGGCAGGATCCTTTCTGTTGCAGTGAATG
ATGAAGGTTCTCGAAATCTGGATGACATGGCCAGGAAGGCGATGACCAAATTGGGAAGCAAACACTTCCTGCA
CCTTGGATTTAGGGTGGAGTGGACGGAGTGGTTCGATCATGATAAAGTATCTCAGACTAAAGGTGGGGAGAAA
ATTTCAGACCTCTGGAAAGCTCACCCAGGAAAAATATGCAATCGTCCCATTGATATACAGCAGGCCACTACAA
TGGATGGAGTTAACCTCAGCACCGAGGTTGTCTACAAAAAAGGCCAGGATTATAGGTTTGCTTGCTACGACCG
GGGCAGAGCCTGCCGGAGCTACCGTGTACGGTTCCTCTGTGGGAAGCCTGTGAGGCCCAAACTCACAGTCACC
ATTGACACCAATGTGAACAGCACCATTCTGAACTTGGAGGATAATGTACAGTCATGGAAACCTGGAGATACCC
TGGTCATTGCCAGTACTGATTACTCCATGTACCAGGCAGAAGAGTTCCAGGTGCTTCCCTGCAGATCCTGCGC
CCCCAACCAGGTCAAAGTGGCAGGGAAACCAATGTACCTGCACATCGGGGAGGAGATAGACGGCGTGGACATG
CGGGCGGAGGTTGGGCTTCTGAGCCGGAACATCATAGTGATGGGGGAGATGGAGGACAAATGCTACCCCTACA
GAAACCACATCTGCAATTTCTTTGACTTCGATACCTTTGGGGGCCACATCAAGTTTGCTCTGGGATTTAAGGC
AGCACACTTGGAGGGCACGGAGCTGAAGCATATGGGACAGCAGCTGGTGGGTCAGTACCCGATTCACTTCCAC
CTGGCCGGTGATGTAGACGAAAGGGGAGGTTATGACCCACCCACATACATCAGGGACCTCTCCATCCATCATA
CATTCTCTCGCTGCGTCACAGTCCATGGCTCCAATGGCTTGTTGATCAAGGACGTTGTGGGCTATAACTCTTT
GGGCCACTGCTTCTTCACGGAAGATGGGCCGGAGGAACGCAACACTTTTGACCACTGTCTTGGCCTCCTTGTC
AAGTCTGGAACCCTCCTCCCCTCGGACCGTGACAGCAAGATGTGCAAGATGATCACAGAGGACTCCTACCCAG
GGTACATCCCCAAGCCCAGGCAAGACTGCAATGCTGTGTCCACCTTCTGGATGGCCAATCCCAACAACAACCT
CATCAACTGTGCCGCTGCAGGATCTGAGGAAACTGGATTTTGGTTTATTTTTCACCACGTACCAACGGGCCCC
TCCGTGGGAATGTACTCCCCAGGTTATTCAGAGCACATTCCACTGGGAAAATTCTATAACAACCGAGCACATT
CCAACTACCGGGCTGGCATGATCATAGACAACGGAGTCAAAACCACCGAGGCCTCTGCCAAGGACAAGCGGCC
GTTCCTCTCAATCATCTCTGCCAGATACAGCCCTCACCAGGACGCCGACCCGCTGAAGCCCCGGGAGCCGGCC
ATCATCAGACACTTCATTGCCTACAAGAACCAGGACCACGGGGCCTGGCTGCGCGGCGGGGATGTGTGGCTGG
ACAGCTGCCGGTTTGCTGACAATGGCATTGGCCTGACCCTGGCCAGTGGTGGAACCTTCCCGTATGACGACGG
CTCCAAGCAAGAGATAAAGAACAGCTTGTTTGTTGGCGAGAGTGGCAACGTGGGGACGGAAATGATGGACAAT
AGGATCTGGGGCCCTGGCGGCTTGGACCATAGCGGAAGGACCCTCCCTATAGGCCAGAATTTTCCAATTAGAG
GAATTCAGTTATATGATGGCCCCATCAACATCCAAAACTGCACTTTCCGAAAGTTTGTGGCCCTGGAGGGCCG
GCACACCAGCGCCCTGGCCTTCCGCCTGAATAATGCCTGGCAGAGCTGCCCCCATAACAACGTGACCGGCATT
GCCTTTGAGGACGTTCCGATTACTTCCAGAGTGTTCTTCGGAGAGCCTGGGCCCTGGTTCAACCAGCTGGACA
TGGATGGGGATAAGACATCTGTGTTCCATGACGTCGACGGCTCCGTGTCCGAGTACCCTGGCTCCTACCTCAC
GAAGAATGACAACTGGCTGGTCCGGCACCCAGACTGCATCAATGTTCCCGACTGGAGAGGGGCCATTTGCAGT
GGGTGCTATGCACAGATGTACATTCAAGCCTACAAGACCAGTAACCTGCGAATGAAGATCATCAAGAATGACT
TCCCCAGCCACCCTCTTTACCTGGAGGGGGCGCTCACCAGGAGCACCCATTACCAGCAATACCAACCGGTTGT
CACCCTGCAGAAGGGCTACACCATCCACTGGGACCAGACGGCCCCCGCCGAACTCGCCATCTGGCTCATCAAC
TTCAACAAGGGCGACTGGATCCGAGTGGGGCTCTGCTACCCGCGAGGCACCACATTCTCCATCCTCTCGGATG
TTCACAATCGCCTGCTGAAGCAAACGTCCAAGACGGGCGTCTTCGTGAGGACCTTGCAGATGGACAAAGTGGA
GCAGAGCTACCCTGGCAGGAGCCACTACTACTGGGACGAGGACTCAGGGCTGTTGTTCCTGAAGCTGAAAGCT
CAGAACGAGAGAGAGAAGTTTGCTTTCTGCTCCATGAAAGGCTGTGAGAGGATAAAGATTAAAGCTCTGATTC
CAAAGAACGCAGGCGTCAGTGACTGCACAGCCACAGCTTACCCCAAGTTCACCGAGAGGGCTGTCGTAGACGT
GCCGATGCCCAAGAAGCTCTTTGGTTCTCAGCTGAAAACAAAGGACCATTTCTTGGAGGTGAAGATGGAGAGT
TCCAAGCAGCACTTCTTCCACCTCTGGAACGACTTCGCTTACATTGAAGTGGATGGGAAGAAGTACCCCAGTT
CGGAGGATGGCATCCAGGTGGTGGTGATTGACGGGAACCAAGGGCGCGTGGTGAGCCACACGAGCTTCAGGAA
CTCCATTCTGCAAGGCATACCATGGCAGCTTTTCAACTATGTGGCGACCATCCCTGACAATTCCATAGTGCTT
ATGGCATCAAAGGGAAGATACGTCTCCAGAGGCCCATGGACCAGAGTGCTGGAAAAGCTTGGGGCAGACAGGG
GTCTCAAGTTGAAAGAGCAAATGGCATTCGTTGGCTTCAAAGGCAGCTTCCGGCCCATCTGGGTGACACTGGA
CACTGAGGATCACAAAGCCAAAATCTTCCAAGTTGTGCCCATCCCTGTGGTGAAGAAGAAGAAGTTGTGAGGA
CAGCTGCCGCCCGGTGCCACCTCGTGGTAGACTATGACGGTGAC

| | | | |
|---|---|---|---|
| NOV11b, CG59889-01 | | | |
| Protein Sequence | SEQ ID NO: 120 | 1378 aa | MW at 155014.9kD |

MYYTISRKHILETHLPQNTQSREGAGPNPGATPPPPPVPRASRRLTKRLEREDRSTALQPGQQSETLSQKKKR
SKNNYAVCLDILIFVLISFFLPLKTPLGETSAAGCPDQSPELQPWNPGHDQDHHVHIGQGKTLLLTSSATVYS
IHISEGGKLVTKDHDEPIVLRTRHILIDNGGELHAGSALCPFQGNFTIILYGRADEGIQPDPYYGLKYIGVGK
GGALELHGQKKLSWTFLNKTLHPGGMAEGGYFFERSWGHRGVIVHVIDPKSGTVIHSDRFDTYRSKKESERLV
QYLNAVPDGRILSVAVNDEGSRNLDDMARKAMTKLGSKHFLHLGFRVEWTEWFDHDKVSQTKGGEKISDLWKA
HPGKICNRPIDIQQATTMDGVNLSTEVVYKKGQDYRFACYDRGRACRSYRVRFLCGKPVRPKLTVTIDTNVNS
TILNLEDNVQSWKPGDTLVIASTDYSMYQAEEFQVLPCRSCAPNQVKVAGKPMYLHIGEEIDGVDMRAEVGLL
SRNIIVMGEMEDKCYPYRNHICNFFDFDTFGGHIKFALGFKAAHLEGTELKHMGQQLVGQYPIHFHLAGDVDE
RGGYDPPTYIRDLSIHHTFSRCVTVHGSNGLLIKDVVGYNSLGHCFFTEDGPEERNTFDHCLGLLVKSGTLLP
SDRDSKMCKMITEDSYPGYIPKPRQDCNAVSTFWMANPNNNLINCAAAGSEETGFWFIFHHVPTGPSVGMYSP
GYSEHIPLGKFYNNRAHSNYRAGMIIDNGVKTTEASAKDKRPFLSIISARYSPHQDADPLKPREPAIIRHFIA
YKNQDHGAWLRGGDVWLDSCRFADNGIGLTLASGGTFPYDDGSKQEIKNSLFVGESGNVGTEMMDNRIWGPGG
LDHSGRTLPIGQNFPIRGIQLYDGPINIQNCTFRKFVALEGRHTSALAFRLNNAWQSCPHNNVTGIAFEDVPI
TSRVFFGEPGPWFNQLDMDGDKTSVFHDVDGSVSEYPGSYLTKNDNWLVRHPDCINVPDWRGAICSGCYAQMY
IQAYKTSNLRMKIIKNDFPSHPLYLEGALTRSTHYQQYQPVVTLQKGYTIHWDQTAPAELAIWLINFNKGDWI
RVGLCYPRGTTFSILSDVHNRLLKQTSKTGVFVRTLQMDKVEQSYPGRSHYYWDEDSGLLFLKLKAQNEREKF
AFCSMKGCERIKIKALIPKNAGVSDCTATAYPKFTERAVVDVPMPKKLFGSQLKTKDHFLEVKMESSKQHFFH
LWNDFAYIEVDGKKYPSSEDGIQVVVIDGNQGRVVSHTSFRNSILQGIPWQLFNYVATIPDNSIVLMASKGRY
VSRGPWTRVLEKLGADRGLKLKEQMAFVGFKGSFRPIWVTLDTEDHKAKIFQVVPIPVVKKKKL

| | | |
|---|---|---|
| NOV11c, CG59889-07 | SEQ ID NO: 121 | 610 bp |
| DNA Sequence | ORF Start: at 11 | ORF Stop: end of sequence |

CACCAGATCTTGCCCTGACCAGAGCCCTGAGTTGCAACCCTGGAACCCTGGCCATGACCAAGACCACCATGTG
CATATCGGCCAGGGCAAGACACTGCTGCTCACCTCTTCTGCCACGGTCTATTCCATCCACATCTCAGAGGGAG
GCAAGCTGGTCATTAAAGACCACGACGAGCCGATTGTTTTGCGAACCCGGCACATCCTGATTGACAACGGAGG
AGAGCTGCATGCTGGGAGTGCCCTCTGCCCTTTCCAGGGCAATTTCACCATCATTTTGTATGGAAGGGCTGAT
GAAGGTATTCAGCCGGATCCTTACTATGGTCTGAAGTACATTGGGGTTGGTAAAGGAGGCGCTCTTGAGTTGC
ATGGACAGAAAAAGCTCTCCTGGACATTTCTGAACAAGACCCTTCACCCAGGTGGCATGGCAGAAGGAGGCTA
TTTTTTTGAAAGGAGCTGGGGCCACCGTGGAGTTATTGTTCATGTCATCGACCCCAAATCAGGCACAGTCATC
CATTCTGACCGGTTTGACACCTATAGATCCAAGAAAGAGAGTGAACGTCTGGTCCAGTATTTGAACGCGGTGC
CCGATGGCAGGATCCTTTCTGTTGCA

| | | | |
|---|---|---|---|
| NOV11c, CG59889-07 | | | |
| Protein Sequence | SEQ ID NO: 122 | 200 aa | MW at 22110.8kD |

CPDQSPELQPWNPGHDQDHHVHIGQGKTLLLTSSATVYSIHISEGGKLVIKDHDEPIVLRTRHILIDNGGELH
AGSALCPFQGNFTIILYGRADEGIQPDPYYGLKYIGVGKGGALELHGQKKLSWTFLNKTLHPGGMAEGGYFFE
RSWGHRGVIVHVIDPKSGTVIHSDRFDTYRSKKESERLVQYLNAVPDGRILSVA

| | | |
|---|---|---|
| NOV11d, CG59889-09 | SEQ ID NO: 123 | 366 bp |
| DNA Sequence | ORF Start: at 1 | ORF Stop: end of sequence |

GATGGGAAGAAGTACCCCAGTTCGGAGGATGGCATCCAGGTGGTGGTGATTGACGGGAACCAAGGGCGCGTGG
TGAGCCACACGAGCTTCAGGAACTCCATTCTGCAAGGCATACCATGGCAGCTTTTCAACTATGTGGCGACCAT
CCCTGACAATTCCATAGTGCTTATGGCATCAAAGGGAAGATACGTCTCCAGAGGCCCATGGACCAGAGTGCTG
GAAAAGCTTGGGGCAGACAGGGGTCTCAAGTTGAAAGAGCAAATGGCATTCGTTGGCTTCAAAGGCAGCTTCC
GGCCCATCTGGGTGACACTGGACACTGAGGATCACAAAGCCAAAATCTTCCAAGTTGTGCCCATCCCTGTGGT
G

| | | | |
|---|---|---|---|
| NOV11d, CG59889-09 | | | |
| Protein Sequence | SEQ ID NO: 124 | 122 aa | MW at 13642.7kD |

DGKKYPSSEDGIQVVVIDGNQGRVVSHTSFRNSILQGIPWQLFNYVATIPDNSIVLMASKGRYVSRGPWTRVL
EKLGADRGLKLKEQMAFVGFKGSFRPIWVTLDTEDHKAKIFQVVPIPVV

| | | |
|---|---|---|
| NOV11e, CG59889-10 | SEQ ID NO: 125 | 772 bp |
| DNA Sequence | ORF Start: at 11 | ORF Stop: at 764 |

CACCAGATCTCATGTGCATATCGGCCAGGGCAAGACACTGCTGCTCACCTCTTCTGCCACGGTCTATTCCATC
CACATCTCAGAGGGAGGCAAGCTGGTCATTAAAGACCACGACGAGCCGATTGTTTTGCGAACCCGGCACATCC
TGATTGACAACGGAGGAGAGCTGCATGCTGGGAGTGCCCTCTGCCCTTTCCAGGGCAATTTCACCATCATTTT
GTATGGAAGGGCTGATGAAGGTATTCAGCCGGATCCTTACTATGGTCTGAAGTACATTGGGGTTGGTAAAGGA
GGCGCTCTTGAGTTGCATGGACAGAAAAAGCTCTCCTGGACATTTCTGAACAAGACCCTTCACCCAGGTGGCA
TGGCAGAAGGAGGCTATTTTTTTGAAAGGAGCTGGGGCCACCGTGGAGTTATTGTTCATGTCATCGACCCCAA
ATCAGGCACAGTCATCCATTCTGACCGGTTTGACACCTATAGATCCAAGAAAGAGAGTGAACGTCTGGTCCAG
TATTTGAACGCGGTGCCCGATGGCAGGATCCTTTCTGTTGCAGTGAATGATGAAGGTTCTCGAAATCTGGATG
ACATGGCCAGGAAGGCGATGACCAAATTGGGAAGCAAACACTTCCTGCACCTTGGATTTAGACACCCTTGGAG
TTTTCTAACTGTGAAAGGAAATCCATCATCTTCAGTGGAAGACCATATTGAATATCATGGACATCGAGGCTCT
GCTGCTGCCCGGGTATTCAAATTGTTCCAGACACTCGAGGGC

| | | | |
|---|---|---|---|
| NOV11e, CG59889-10 | | | |
| Protein Sequence | SEQ ID NO: 126 | 251 aa | MW at 27832.4kD |

HVHIGQGKTLLLTSSATVYSIHISEGGKLVIKDHDEPIVLRTRHILIDNGGELHAGSALCPFQGNFTIILYGR
ADEGIQPDPYYGLKYIGVGKGGALELHGQKKLSWTFLNKTLHPGGMAEGGYFFERSWGHRGVIVHVIDPKSGT
VIHSDRFDTYRSKKESERLVQYLNAVPDGRILSVAVNDEGSRNLDDMARKAMTKLGSKHFLHLGFRHPWSFLT
VKGNPSSSVEDHIEYHGHRGSAAARVFKLFQT

| | | |
|---|---|---|
| NOV11f, CG59889-11 | SEQ ID NO: 127 | 1309 bp |
| DNA Sequence | ORF Start: at 11 | ORF Stop: at 1301 |

CACCAGATCTGATCATGATAAAGTATCTCAGACTAAAGGTGGGGAGAAAATTTCAGACCTCTGGAAAGCTCAC
CCAGGAAAAATATGCAATCGTCCCATTGATATACAGGCCACTACAATGGATGGAGTTAACCTCAGCACCGAGG
TTGTCTACAAAAAAGGCCAGGATTATAGGTTTGCTTGCTACGACCGGGGCAGAGCCTGCCGGAGCTACCGTGT
ACGGTTCCTCTGTGGGAAGCCTGTGAGGCCCAAACTCACAGTCACCATTGACACCAATGTGAACAGCACCATT
CTGAACTTGGAGGATAATGTACAGTCATGGAAACCTGGAGATACCCTGGTCATTGCCAGTACTGATTACTCCA
TGTACCAGGCAGAAGAGTTCCAGGTGCTTCCCTGCAGATCCTGCGCCCCCAACCAGGTCAAAGTGGCAGGGAA
ACCAATGTACCTGCACATCGGGGAGGAGATAGACGGCGTGGACATGCGGGCGGAGGTTGGGCTTCTGAGCCGG
AACATCATAGTGATGGGGGAGATGGAGGACAAATGCTACCCCTACAGAAACCACATCTGCAATTTCTTTGACT
TCGATACCTTTGGGGGCCACATCAAGTTTGCTCTGGGATTTAAGGCAGCACACTTGGAGGGCACGGAGCTGAA
GCATATGGGACAGCAGCTGGTGGGTCAGTACCCGATTCACTTCCACCTGGCCGGTGATGTAGACGAAAGGGGA
GGTTATGACCCACCCACATACATCAGGGACCTCTCCATCCATCATACATTCTCTCGCTGCGTCACAGTCCATG
GCTCCAATGGCTTGTTGATCAAGGACGTTGTGGGCTATAACTCTTTGGGCCACTGCTTCTTCACGGAAGATGG
GCCGGAGGAACGCAACACTTTTGACCACTGCCTTGGCCTCCTTGTCAAGTCTGGAACCCTCCTCCCCTCGGAC
CGTGACAGCAAGATGTGCAAGATGATCACAGAGGACTCCTACCCAGGGTACATCCCCAAGCCCAGGCAAGACT
GCAATGCTGTGTCCACCTTCTGGATGGCCAATCCCAACAACAACCTCATCAACTGTGCCGCTGCAGGATCTGA
GGAAACTGGATTTTGGTTTATTTTTCACCACGTACCAACGGGCCCCTCCGTGGGAATGTACTCCCCAGGTTAT
TCAGAGCACATTCCACTGGGAAAATTCTATAACAACCGAGCACATTCCAACTACCGGGCTGGCATGATCATAG
ACAACGGAGTCAAAACCACCGAGGCCTCTGCCAAGGACAAGCGGCCGTTCCTCTCAATCCTCGAGGGC

| | | | |
|---|---|---|---|
| NOV11f, CG59889-11 | | | |
| Protein Sequence | SEQ ID NO: 128 | 430 aa | MW at 48190.2kD |

DHDKVSQTKGGEKISDLWKAHPGKICNRPIDIQATTMDGVNLSTEVVYKKGQDYRFACYDRGRACRSYRVRFL
CGKPVRPKLTVTIDTNVNSTILNLEDNVQSWKPGDTLVIASTDYSMYQAEEFQVLPCRSCAPNQVKVAGKPMY
LHIGEEIDGVDMRAEVGLLSRNIIVMGEMEDKCYPYRNHICNFFDFDTFGGHIKFALGFKAAHLEGTELKHMG
QQLVGQYPIHFHLAGDVDERGGYDPPTYIRDLSIHHTFSRCVTVHGSNGLLIKDVVGYNSLGHCFFTEDGPEE
RNTFDHCLGLLVKSGTLLPSDRDSKMCKMITEDSYPGYIPKPRQDCNAVSTFWMANPNNNLINCAAAGSEETG
FWFIFHHVPTGPSVGMYSPGYSEHIPLGKFYNNRAHSNYRAGMIIDNGVKTTEASAKDKRPFLSI

| | | |
|---|---|---|
| NOV11g, CG59889-12 | SEQ ID NO: 129 | 1081 bp |
| DNA Sequence | ORF Start: at 11 | ORF Stop: at 1073 |

CACCAGATCTGCCTACAAGACCAGTAACCTGCGAATGAAGATCATCAAGAATGACTTCCCCAGCCACCCTCTT
TACCTGGAGGGGGCGCTCACCAGGAGCACCCATTACCAGCAATACCAACCGGTTGTCACCCTGCAGAAGGGCT
ACACCATCCACTGGGACCAGACGGCCCCCGCCGAACTCGCCATCTGGCTCATCAACTTCAACAAGGGCGACTG
GATCCGAGTGGGGCTCTGCTACCCGCGAGGCACCACATTCTCCATCCTCTCGGATGTTCACAATCGCCTGCTG
AAGCAAACGTCCAAGACGGGCGTCTTCGTGAGGACCTTGCAGATGGACAAAGTGGAGCAGAGCTACCCTGGCA
GGAGCCACTACTACTGGGACGAGGACTCAGGGCTGTTGTTCCTGAAGCTGAAAGCTCAGAACGAGAGAGAGAA
GTTTGCTTTCTGCTCCATGAAAGGCTGTGAGAGGATAAAGATTAAAGCTCTGATTCCAAAGAACGCAGGCGTC
AGTGACTGCACAGCCACAGCTTACCCCAAGTTCACCGAGAGGGCTGTCGTAGACGTGCCGATGCCCAAGAAGC
TCTTTGGTTCTCAGCTGAAAACAAAGGACCATTTCTTGGAGGTGAAGATGGAGAGTTCCAAGCAGCACTTCTT
CCACCTCTGGAACGACTTCGCTTACATTGAAGTGGATGGGAAGAAGTACCCCAGTTCGGAGGATGGCATCCAG
GTGGTGGTGATTGACGGGAACCAAGGGCGCGTGGTGAGCCACACGAGCTTCAGGAACTCCATTCTGCAAGGCA
TACCATGGCAGCTTTTCAACTATGTGGCGACCATCCCTGACAATTCCATAGTGCTTATGGCATCAAAGGGAAG
ATACGTCTCCAGAGGCCCATGGACCAGAGTGCTGGAAAAGCTTGGGGCAGACAGGGGTCTCAAGTTGAAAGAG
CAAATGGCATTCGTTGGCTTCAAAGGCAGCTTCCGGCCCATCTGGGTGACACTGGACACTGAGGATCACAAAG
CCAAAATCTTCCAAGTTGTGCCCATCCCTGTGGTGAAGAAGAAGAAGTTGCTCGAGGGC

| | | | |
|---|---|---|---|
| NOV11g, CG59889-12 | | | |
| Protein Sequence | SEQ ID NO: 130 | 354 aa | MW at 40631.7kD |

AYKTSNIRMKIIKNDFPSHPLYLEGALTRSTHYQQYQPVVTLQKGYTIHWDQTAPAELAIWLINFNKGDWIRV
GLCYPRGTTFSILSDVHNRLLKQTSKTGVFVRTLQMDKVEQSYPGRSHYYWDEDSGLLFLKLKAQNEREKFAF
CSMKGCERIKIKALIPKNAGVSDCTATAYPKFTERAVVDVPMPKKLFGSQLKTKDHFLEVKMESSKQHFFHLW
NDFAYIEVDGKKYPSSEDGIQVVVIDGNQGRVVSHTSFRNSILQGIPWQLFNYVATIPDNSIVLMASKGRYVS
RGPWTRVLEKLGADRGLKLKEQMAFVGFKGSFRPIWVTLDTEDHKAKIFQVVPIPVVKKKKL

| | | |
|---|---|---|
| NOV11h, CG59889-13 | SEQ ID NO: 131 | 4108 bp |
| DNA Sequence | ORF Start: ATG at 17 | ORF Stop: at 4100 |

CACCTCGCGAGCCAGGATGGGAGCTGCTGGGAGGCAGGACTTCCTCTTCAAGGCCATGCTGACCATCAGCTGG
CTCACTCTGACCTGCTTCCCTGGGGCCACATCCACAGTGGCTGCTGGGTGCCCTGACCAGAGCCCTGAGTTGC
AACCCTGGAACCCTGGCCATGACCAAGACCACCATGTGCATATCGGCCAGGGCAAGACACTGCTGCTCACCTC
TTCTGCCACGGTCTATTCCATCCACATCTCAGAGGGAGGCAAGCTGGTCATTAAAGACCACGACGAGCCGATT
GTTTTGCGAACCCGGCACATCCTGATTGACAACGGAGGAGAGCTGCATGCTGGGAGTGCCCTCTGCCCTTTCC
AGGGCAATTTCACCATCATTTTGTATGGAAGGGCTGATGAAGGTATTCAGCCGGATCCTTACTATGGTCTGAA
GTACATTGGGGTTGGTAAAGGAGGCGCTCTTGAGTTGCATGGACAGAAAAAACTCTCCTGGACATTTCTGAAC
AAGACCCTTCACCCAGGTGGCATGGCAGAAGGAGGCTATTTTTTTGAAAGGAGCTGGGGCCACCGTGGAGTTA
TTGTTCATGTCATCGACCCCAAATCAGGCACAGTCATCCATTCTGACCGGTTTGACACCTATAGATCCAAGAA
AGAGAGTGAACGTCTGGTCCAGTATTTGAACGCGGTGCCCGATGGCAGGATCCTTTCTGTTGCAGTGAATGAT
GAAGGTTCTCGAAATCTGGATGACATGGCCAGGAAGGCGATGACCAAATTGGGAAGCAAACACTTCCTGCACC
TTGGATTTAGACACCCTTGGAGTTTTCTAACTGTGAAAGGAAATCCATCATCTTCAGTGGAAGACCATATTGA
ATATCATGGACATCGAGGCTCTGCTGCTGCCCGGGTATTCAAATTGTTCCAGACAGAGCATGGCGAATATTTC
AATGTTTCTTTGTCCAGTGAGTGGGTTCAAGACGTGGAGTGGACGGAGTGGTTCGATCATGATAAAGTATCTC
AGACTAAAGGTGGGGAGAAAATTTCAGACCTCTGGAAAGCTCACCCAGGAAAAATATGCAATCGTCCCATTGA
TATACAGGCCACTACAATGGATGGAGTTAACCTCAGCACCGAGGTTGTCTACAAAAAAGGCCAGGATTATAGG
TTTGCTTGCTACGACCGGGGCAGAGCCTGCCGGAGCTACCGTGTACGGTTCCTCTGTGGGAAGCCTGTGAGGC
CCAAACTCACAGTCACCATTGACACCAATGTGAACAGCACCATTCTGAACTTGGAGGATAATGTACAGTCATG
GAAACCTGGAGATACCCTGGTCATTGCCAGTACTGATTACTCCATGTACCAGGCAGAAGAGTTCCAGGTGCTT
CCCTGCAGATCCTGCGCCCCCAACCAGGTCAAAGTGGCAGGGAAACCAATGTACCTGCACATCGGGGAGGAGA
TAGACGGCGTGGACATGCGGGCGGAGGTTGGGCTTCTGAGCCGGAACATCATAGTGATGGGGGAGATGGAGGA
CAAATGCTACCCCTACAGAAACCACATCTGCAATTTCTTTGACTTCGATACCTTTGGGGGCCACATCAAGTTT
GCTCTGGGATTTAAGGCAGCACACTTGGAGGGCACGGAGCTGAAGCATATGGGACAGCAGCTGGTGGGTCAGT
ACCCGATTCACTTCCACCTGGCCGGTGATGTAGACGAAAGGGGAGGTTATGACCCACCCACATACATCAGGGA
CCTCTCCATCCATCATACATTCTCTCGCTGCGTCACAGTCCATGGCTCCAATGGCTTGTTGATCAAGGACGTT
GTGGGCTATAACTCTTTGGGCCACTGCTTCTTCACGGAAGATGGGCCGGAGGAACGCAACACTTTTGACCACT
GTCTTGGCCTCCTTGTCAAGTCTGGAACCCTCCTCCCCTCGGACCGTGACAGCAAGATGTGCAAGATGATCAC
AGAGGACTCCTACCCAGGGTACATCCCCAAGCCCAGGCAAGACTGCAATGCTGTGTCCACCTTCTGGATGGCC
AATCCCAACAACAACCTCATCAACTGTGCCGCTGCAGGATCTGAGGAAACTGGATTTTGGTTTATTTTTCACC
ACGTACCAACGGGCCCCTCCGTGGGAATGTACTCCCCAGGTTATTCAGAGCACATTCCACTGGGAAAATTCTA
TAACAACCGAGCACATTCCAACTACCGGGCTGGCATGATCATAGACAACGGAGTCAAAACCACCGAGGCCTCT
GCCAAGGACAAGCGGCCGTTCCTCTCAATCATCTCTGCCAGATACAGCCCTCACCAGGACGCCGACCCGCTGA
AGCCCCGGGAGCCGGCCATCATCAGACACTTCATTGCCTACAAGAACCAGGACCGCGGGGCCTGGCTGCGCGG
CGGGGATGTGTGGCTGGACAGCTGCCGGTTTGCTGACAATGGCATTGGCCTGACCCTGGCCAGTGGTGGAACC
TTCCCGTATGACGACGGCTCCAAGCAAGAGATAAAGAACAGCTTGTTTGTTGGCGAGAGTGGCAACGTGGGGA
CGGAAATGATGGACAATAGGATCTGGGGCCCTGGCGGCTTGGACCATAGCGGAAGGACCCTCCCTATAGGCCA
GAATTTTCCAATTAGAGGAATTCAGTTATATGATGGCCCCATCAACATCCTAAACTGCACTTTCCGAAAGTTT
GTGGCCCTGGAGGGCCGGCACACCAGCGCCCTGGCCTTCCGCCTGAATAATGCCTGGCAGAGCTGCCCCCATA
ACAACGTGACCGGCATTGCCTTTGAGGACGTTCCGATTACTTCCAGAGTGTTCTTCGGAGAGCCTGGGCCCTG
GTTCAACCAGCTGGACATGGATGGGGATAAGACATCTGTGTTCCATGACGTCGACGGCTCCGTGTCCGAGTAC
CCTGGCTCCTACCTCACGAAGAATGACAACTGGCTGGTCCGGCACCCAGACTGCATCAATGTTCCCGACTGGA
GAGGGGCCATTTGCAGTGGGTGCTATGCACAGATGTACATTCAAGCCTACAAGACCAGTAACCTGCGAATGAA
GATCATCAAGAATGACTTCCCCAGCCACCCTCTTTACCTGGAGGGGGCGCTCACCAGGAGCACCCATTACCAG
CAATACCAACCGGTTGTCACCCTGCAGAAGGGCTACACCATCCACTGGGACCAGACGGCCCCCGCCGAACTCG
CCATCTGGCTCATCAACTTCAACAAGGGCGACTGGATCCGAGTGGGGCTCTGCTACCCGCGAGGCACCACATT
CTCCATCCTCTCGGATGTTCACAATCGCCTGCTGAAGCAAACGTCCAAGACGGGCGTCTTCGTGAGGACCTTG
CAGATGGACAAAGTGGAGCAGAGCTACCCTGGCAGGAGCCACTACTACTGGGACGAGGACTCAGGGCTGTTGT
TCCTGAAGCTGAAAGCTCAGAACGAGAGAGAGAAGTTTGCTTTCTGCTCCATGAAAGGCTGTGAGAGGATAAA
GATTAAAGCTCTGATTCCAAAGAACGCAGGCGTCAGTGACTGCACAGCCACAGCTTACCCCAAGTTCACCGAG
AGGGCTGTCGTAGACGTGCCGATGCCCAAGAAGCTCTTTGGTTCTCAGCTGAAAACAAAGGACCATTTCTTGG
AGGTGAAGATGGAGAGTTCCAAGCAGCACTTCTTCCACCTCTGGAACGACTTCGCTTACATTGAAGTGGATGG
GAAGAAGTACCCCAGTTCGGAGGATGGCATCCAGGTGGTGGTGATTGACGGGAACCAAGGGCGCGTGGTGAGC
CACACGAGCTTCAGGAACTCCATTCTGCAAGGCATACCATGGCAGCTTTTCAACTATGTGGCGACCATCCCTG
ACAATTCCATAGTGCTTATGGCATCAAAGGGAAGATACGTCTCCAGAGGCCCATGGACCAGAGTGCTGGAAAA
GCTTGGGGCAGACAGGGGTCTCAAGTTGAAAGAGCAAATGGCATTCGTTGGCTTCAAAGGCAGCTTCCGGCCC
ATCTGGGTGACACTGGACACTGAGGATCACAAAGCCAAAATCTTCCAAGTTGTGCCCATCCCTGTGGTGAAGA
AGAAGAAGTTGCTCGAGGGC

| | | | |
|---|---|---|---|
| NOV11h, CG59889-13 | | | |
| Protein Sequence | SEQ ID NO: 132 | 1361 aa | MW at 153000.5kD |

MGAAGRQDFLFKAMLTISWLTLTCFPGATSTVAAGCPDQSPELQPWNPGHDQDHHVHIGQGKTLLLTSSATVY
SIHISEGGKLVIKDHDEPIVLRTRHILIDNGGELHAGSALCPFQGNFTIILYGRADEGIQPDPYYGLKYIGVG
KGGALELHGQKKLSWTFLNKTLHPGGMAEGGYFFERSWGHRGVIVHVIDPKSGTVIHSDRFDTYRSKKESERL
VQYLNAVPDGRILSVAVNDEGSRNLDDMARKAMTKIGSKMFLHLGFRHPWSFLTVKGNPSSSVEDHIEYHGHR
GSAAARVFKLFQTEHGEYFNVSLSSEWVQDVEWTEWFDHDKVSQTKGGEKISDLWKAHPGKICNRPIDIQATT
MDGVNLSTEVVYKKGQDYRFACYDRGRACRSYRVRFLCGKPVRPKLTVTIDTNVNSTILNLEDNVQSWKPGDT
LVIASTDYSMYQAEEFQVLPCRSCAPNQVKVAGKPMYLHIGEEIDGVDMRAEVGLLSRNIIVMGEMEDKCYPY
RNHICNFFDFDTFGGHIKFALGFKAAHLEGTELKHMGQQLVGQYPIHFHLAGDVDERGGYDPPTYIRDLSIHH
TFSRCVTVHGSNGLLIKDVVGYNSLGHCFFTEDGPEERNTFDHCLGLLVKSGTLLPSDRDSKMCKMITEDSYP
GYIPKPRQDCNAVSTFWMANPNNNLINCAAAGSEETGFWFIFHHVPTGPSVGMYSPGYSEHIPLGKFYNNRAH
SNYRAGMIIDNGVKTTEASAKDKRPFLSIISARYSPHQDADPLKPREPAIIRHFIAYKNQDRGAWLRGGDVWL
DSCRFADNGIGLTLASGGTFPYDDGSKQEIKNSLFVGESGNVGTEMMDNRIWGPGGLDHSGRTLPIGQNFPIR
GIQLYDGPINILNCTFRKFVALEGRHTSALAFRLNNAWQSCPHNNVTGIAFEDVPITSRVFFGEPGPWFNQLD
MDGDKTSVFHDVDGSVSEYPGSYLTKNDNWLVRHPDCINVPDWRGAICSGCYAQMYIQAYKTSNLRMKIIKND
FPSHPLYLEGALTRSTHYQQYQPVVTLQKGYTIHWDQTAPAELAIWLINFNKGDWIRVGLCYPRGTTFSILSD
VHNRLLKQTSKTGVFVRTLQMDKVEQSYPGRSHYYWDEDSGLLFLKLKAQNEREKFAFCSMKGCERIKIKALI
PKNAGVSDCTATAYPKFTERAVVDVPMPKKLFGSQLKTKDHFLEVKMESSKQHFFHLWNDFAYIEVDGKKYPS
SEDGIQVVVIDGNQGRVVSHTSFRNSILQGIPWQLFNYVATIPDNSIVLMASKGRYVSRGPWTRVLEKLGADR
GLKLKEQMAFVGFKGSFRPIWVTLDTEDHKAKIFQVVPIPVVKKKKL

| | | |
|---|---|---|
| NOV11i, 311979177 | SEQ ID NO: 133 | 3058 bp |
| DNA Sequence | ORF Start: at 11 | ORF Stop: at 3053 |

CACCGGTACCGCTCACCCAGGAAAAATATGCAATCGTCCCATTGATATACAGGCCACTACAATGGATGGAGTT
AACCTCAGCACCGAGGTTGTCTACAAAAAAGGCCAGGATTATAGGTTTGCTTGCTACGACCGGGGCAGAGCCT
GCCGGAGCTACCGTGTACGGTTCCTCTGTGGGAAGCCTGTGAGGCCCAAACTCACAGTCACCATTGACACCAA
TGTGAACAGCACCATTCTGAACTTGGAGGATAATGTACAGTCATGGAAACCTGGAGATACCCTGGTCATTGCC
AGTACTGATTACTCCATGTACCAGGCAGAAGAGTTCCAGGTGCTTCCCTGCAGATCCTGCGCCCCCAACCAGG
TCAAAGTGGCAGGGAAACCAATGTACCTGCACATCGGGGAGGAGATAGACGGCGTGGACATGCGGGCGGAGGT
TGGGCTTCTGAGCCGGAACATCATAGTGATGGGGGAGATGGAGGACAAATGCTACCCCTACAGAAACCACATC
TGCAATTTCTTTGACTTCGATACCTTTGGGGGCCACATCAAGTTTGCTCTGGGATTTAAGGCAGCACACTTGG
AGGGCACGGAGCTGAAGCATATGGGACAGCAGCTGGTGGGTCAGTACCCGATTCACTTCCACCTGGCCGGTGA
TGTAGACGAAAGGGGAGGTTATGACCCACCCACATACATCAGGGACCTCTCCATCCATCATACATTCTCTCGC
TGCGTCACAGTCCATGGCTCCAATGGCTTGTTGATCAAGGACGTTGTGGGCTATAACTCTTTGGGCCACTGCT
TCTTCACGGAAGATGGGCCGGAGGAACGCAACACTTTTGACCACTGTCTTGGCCTCCTTGTCAAGTCTGGAAC
CCTCCTCCCCTCGGACCGTGACAGCAAGATGTGCAAGATGATCACAGAGGACTCCTACCCAGGGTACATCCCC
AAGCCCAGGCAAGACTGCAATGCTGTGTCCACCTTCTGGATGGCCAATCCCAACAACAACCTCATCAACTGTG
CCGCTGCAGGATCTGAGGAAACTGGATTTTGGTTTATTTTTCACCACGTACCAACGGGCCCCTCCGTGGGAAT
GTACTCCCCAGGTTATTCAGAGCACATTCCACTGGGAAAATTCTATAACAACCGAGCACATTCCAACTACCGG
GCTGGCATGATCATAGACAACGGAGTCAAAACCACCGAGGCCTCTGCCAAGGACAAGCGGCCGTTCCTCTCAA
TCATCTCTGCCAGATACAGCCCTCACCAGGACGCCGACCCGCTGAAGCCCCGGGAGCCGGCCATCATCAGACA
CTTCATTGCCTACAAGAACCAGGACCACGGGGCCTGGCTGCGCGGCGGGGATGTGTGGCTGGACAGCTGCCGG
TTTGCTGACAATGGCATTGGCCTGACCCTGGCCAGTGGTGGAACCTTCCCGTATGACGACGGCTCCAAGCAAG
AGATAAAGAACAGCTTGTTTGTTGGCGAGAGTGGCAACGTGGGGACGGAAATGATGGACAATAGGATCTGGGG
CCCTGGCGGCTTGGACCATAGCGGAAGGACCCTCCCTATAGGCCAGAATTTTCCAATTAGAGGAATTCAGTTA
TATGATGGCCCCATCAACATCCAAAACTGCACTTTCCGAAAGTTTGTGGCCCTGGAGGGCCGGCACACCAGCG
CCCTGGCCTTCCGCCTGAATAATGCCTGGCAGAGCTGCCCCCATAACAACGTGACCGGCATTGCCTTTGAGGA
CGTTCCGATTACTTCCAGAGTGTTCTTCGGAGAGCCTGGGCCCTGGTTCAACCAGCTGGACATGGATGGGGAT
AAGACATCTGTGTTCCATGACGTCGACGGCTCCGTGTCCGAGTACCCTGGCTCCTACCTCACGAAGAATGACA
ACTGGCTGGTCCGGCACCCAGACTGCATCAATGTTCCCGACTGGAGAGGGGCCATTTGCAGTGGGTGCTATGC
ACAGATGTACATTCAAGCCTACAAGACCAGTAACCTGCGAATGAAGATCATCAAGAATGACTTCCCCAGCCAC
CCTCTTTACCTGGAGGGGGCGCTCACCAGGAGCACCCATTACCAGCAATACCAACCGGTTGTCACCCTGCAGA
AGGGCTACACCATCCACTGGGACCAGACGGCCCCCGCCGAACTCGCCATCTGGCTCATCAACTTCAACAAGGG
CGACTGGATCCGAGTGGGGCTCTGCTACCCGCGAGGCACCACATTCTCCATCCTCTCGGATGTTCACAATCGC
CTGCTGAAGCAAACGTCCAAGACGGGCGTCTTCGTGAGGACCTTGCAGATGGACAAAGTGGAGCAGAGCTACC
CTGGCAGGAGCCACTACTACTGGGACGAGGACTCAGGGCTGTTGTTCCTGAAGCTGAAAGCTCAGAACGAGAG
AGAGAAGTTTGCTTTCTGCTCCATGAAAGGCTGTGAGAGGATAAAGATTAAAGCTCTGATTCCAAAGAACGCA
GGCGTCAGTGACTGCACAGCCACAGCTTACCCCAAGTTCACCGAGAGGGCTGTCGTAGACGTGCCGATGCCCA
AGAAGCTCTTTGGTTCTCAGCTGAAAACAAAGGACCATTTCTTGGAGGTGAAGATGGAGAGTTCCAAGCAGCA
CTTCTTCCACCTCTGGAACGACTTCGCTTACATTGAAGTGGATGGGAAGAAGTACCCCAGTTCGGAGGATGGC
ATCCAGGTGGTGGTGATTGACGGGAACCAAGGGCGCGTGGTGAGCCACACGAGCTTCAGGAACTCCATTCTGC
AAGGCATACCATGGCAGCTTTTCAACTATGTGGCGACCATCCCTGACAATTCCATAGTGCTTATGGCATCAAA
GGGAAGATACGTCTCCAGAGGCCCATGGACCAGAGTGCTGGAAAAGCTTGGGGCAGACAGGGGTCTCAAGTTG
AAAGAGCAAATGGCATTCGTTGGCTTCAAAGGCAGCTTCCGGCCCATCTGGGTGACACTGGACACTGAGGATC
ACAAAGCCAAAATCTTCCAAGTTGTGCCCATCCCTGTGGTGAAGAAGAAGAAGTTGCTCGAGGGC

| | | | |
|---|---|---|---|
| NOV11i, 311979177 | | | |
| Protein Sequence | SEQ ID NO: 134 | 1014 aa | MW at 114357.5kD |

AHPGKICNRPIDIQATTMDGVNLSTEVVYKKGQDYRFACYDRGRACRSYRVRFLCGKPVRPKLTVTIDTNVNS
TILNLEDNVQSWKPGDTLVIASTDYSMYQAEEFQVLPCRSCAPNQVKVAGKPMYLHIGEEIDGVDMRAEVGLL
SRNIIVMGEMEDKCYPYRNHICNFFDFDTFGGHIKFALGFKAAHLEGTELKHMGQQLVGQYPIHFHLAGDVDE
RGGYDPPTYIRDLSIHHTFSRCVTVHGSNGLLIKDVVGYNSLGHCFFTEDGPEERNTFDHCLGLLVKSGTLLP
SDRDSKMCKMITEDSYPGYIPKPRQDCNAVSTFWMANPNNNLINCAAAGSEETGFWFIFHHVPTGPSVGMYSP
GYSEHIPLGKFYNNPAHSNYRAGMIIDNGVKTTEASAKDKRPFLSIISARYSPHQDADPLKPREPAIIRHFIA
YKNQDHGAWLRGGDVWLDSCRFADNGIGLTLASGGTFPYDDGSKQEIKNSLFVGESGNVGTEMMDNRTWGPGG
LDHSGRTLPIGQNFPIRGIQLYDGPINIQNCTFRKFVALEGRHTSALAFRLNNAWQSCPHNNVTGIAFEDVPI
TSRVFFGEPGPWFNQLDMDGDKTSVFHDVDGSVSEYPGSYLTKNDNWLVRHPDCINVPDWRGAICSGCYAQMY
IQAYKTSNLRMKIIKNDFPSHPLYLEGALTRSTHYQQYQPVVTLQKGYTIHWDQTAPAELAIWLINFNKGDWI
RVGLCYPRGTTFSILSDVHNRLLKQTSKTGVFVRTLQMDKVEQSYPGRSHYYWDEDSGLLFLKLKAQNEREKF
AFCSMKGCERIKIKALIPKNAGVSDCTATAYPKFTERAVVDVPMPKKLFGSQLKTKDHFLEVKMESSKQHFFH
LWNDFAYIEVDGKKYPSSEDGIQVVVIDGNQGRVVSHTSFRNSILQGIPWQLFNYVATIPDNSIVLMASKGRY
VSRGPWTRVLEKLGADRGLKLKEQMAFVGFKGSFRPIWVTLDTEDHKAKIFQVVPIPVVKKKKLL

| | | |
|---|---|---|
| NOV11j, 314361479 | SEQ ID NO: 135 | 3997 bp |
| DNA Sequence | ORF Start: at 11 | ORF Stop: at 3992 |

CACCAGATCTTGCCCTGACCAGAGCCCTGAGTTGCAACCCTGGAACCCTGGCCATGACCAAGACCACCATGTG
CATATCGGCCAGGGCAAGACACTGCTGCTCACCTCTTCTGCCACGGTCTATTCCATCCACATCTCAGAGGGAG
GCAAGCTGGTCATTAAAGACCACGACGAGCCGATTGTTTTGCGAACCCGGCACATCCTGATTGACAACGGAGG
AGAGCTGCATGCTGGGAGTGCCCTCTGCCCTTTCCAGGGCAATTTCACCATCATTTTGTATGGAAGGGCTGAT
GAAGGTATTCAGCCGGATCCTTACTATGGTCTGAAGTACATTGGGGTTGGTAAAGGAGGCGCTCTTGAGTTGC
ATGGACAGAAAAAGCTCTCCTGGACATTTCTGAACAAGACCCTTCACCCAGGTGGCATGGCAGAAGGAGGCTA
TTTTTTTGAAAGGAGCTGGGGCCACCGTGGAGTTATTGTTCATGTCATCGACCCCAAATCAGGCACAGTCATC
CATTCTGACCGGTTTGACACCTATAGATCCAAGAAAGAGAGTGAACGTCTGGTCCAGTATTTGAACGCGGTGC
CCGATGGCAGGATCCTTTCTGTTGCAGTGAATGATGAAGGTTCTCGAAATCTGGATGACATGGCCAGGAAGGC
GATGACCAAATTGGGAAGCAAACACTTCCTGCACCTTGGATTTAGACACCCTTGGAGTTTTCTAACTGTGAAA
GGAAATCCATCATCTTCAGTGGAAGACCATATTGAATATCATGGACATCGAGGCTCTGCTGCTGCCCGGGTAT
TCAAATTGTTCCAGACAGAGCATGGCGAATATTTCAATGTTTCTTTGTCCAGTGAGTGGGTTCAAGACGTGGA
GTGGACGGAGTGGTTCGATCATGATAAAGTATCTCAGACTAAAGGTGGGGAGAAAATTTCAGACCTCTGGAAA
GCTCACCCAGGAAAAATATGCAATCGTCCCATTGATATACAGGCCACTACAATGGATGGAGTTAACCTCAGCA
CCGAGGTTGTCTACAAAAAAGGCCAGGATTATAGGTTTGCTTGCTACGACCGGGGCAGAGCCTGCCGGAGCTA
CCGTGTACGGTTCCTCTGTGGGAAGCCTGTGAGGCCCAAACTCACAGTCACCATTGACACCAATGTGAACAGC
ACCATTCTGAACTTGGAGGATAATGTACAGTCATGGAAACCTGGAGATACCCTGGTCATTGCCAGTACTGATT
ACTCCATGTACCAGGCAGAAGAGTTCCAGGTGCTTCCCTGCAGATCCTGCGCCCCCAACCAGGTCAAAGTGGC
AGGGAAACCAATGTACCTGCACATCGGGGAGGAGATAGACGGCGTGGACATGCGGGCGGAGGTTGGGCTTCTG
AGCCGGAACATCATAGTGATGGGGGAGATGGAGGACAAATGCTACCCCTACAGAAACCACATCTGCAATTTCT
TTGACTTCGATACCTTTGGGGGCCACATCAAGTTTGCTCTGGGATTTAAGGCAGCACACTTGGAGGGCACGGA
GCTGAAGCATATGGGACAGCAGCTGGTGGGTCAGTACCCGATTCACTTCCACCTGGCCGGTGATGTAGACGAA
AGGGGAGGTTATGACCCACCCACATACATCAGGGACCTCTCCATCCATCATACATTCTCTCGCTGCGTCACAG
TCCATGGCTCCAATGGCTTGTTGATCAAGGACGTTGTGGGCTATAACTCTTTGGGCCACTGCTTCTTCACGGA
AGATGGGCCGGAGGAACGCAACACTTTTGACCACTGCCTTGGCCTCCTTGTCAAGTCTGGAACCCTCCTCCCC
TCGGACCGTGACAGCAAGATGTGCAAGATGATCACAGAGGACTCCTACCCAGGGTACATCCCCAAGCCCAGGC
AAGACTGCAATGCTGTGTCCACCTTCTGGATGGCCAATCCCAACAACAACCTCATCAACTGTGCCGCTGCAGG
ATCTGAGGAAACTGGATTTTGGTTTATTTTTCACCACGTACCAACGGGCCCCTCCGTGGGAATGTACTCCCCA
GGTTATTCAGAGCACATTCCACTGGGAAAATTCTATAACAACCGAGCACATTCCAACTACCGGGCTGGCATGA
TCATAGACAACGGAGTCAAAACCACCGAGGCCTCTGCCAAGGACAAGCGGCCGTTCCTCTCAATCATCTCTGC
CAGATACAGCCCTCACCAGGACGCCGACCCGCTGAAGCCCCGGGAGCCGGCCATCATCAGACACTTCATTGCC
TACAAGAACCAGGACCACGGGGCCTGGCTGCGCGGCGGGGATGTGTGGCTGGACAGCTGCCGGTTTGCTGACA
ATGGCATTGGCCTGACCCTGGCCAGTGGTGGAACCTTCCCGTATGACGACGGCTCCAAGCAAGAGATAAAGAA
CAGCTTGTTTGTTGGCGAGAGTGGCAACGTGGGGACGGAAATGATGGACAATAGGATCTGGGGCCCTGGCGGC
TTGGACCATAGCGGAAGGACCCTCCCTATAGGCCAGAATTTTCCAATTAGAGGAATTCAGTTATATGATGGCC
CCATCAACATCCAAAACTGCACTTTCCGAAAGTTTGTGGCCCTGGAGGGCCGGCACACCAGCGCCCTGGCCTT
CCGCCTGAATAATGCCTGGCAGAGCTGCCCCCATAACAACGTGACCGGCATTGCCTTTGAGGACGTTCCGATT
ACTTCCAGAGTGTTCTTCGGAGAGCCTGGGCCCTGGTTCAACCAGCTGGACATGGATGGGGATAAGACATCTG
TGTTCCATGACGTCGACGGCTCCGTGTCCGAGTACCCTGGCTCCTACCTCACGAAGAATGGCAACTGGCTGGT
CCGGCACCCAGACTGCATCAATGTTCCCGACTGGAGAGGGGCCATTTGCAGTGGGTGCTATGCACAGATGTAC
ATTCAAGCCTACAAGACCAGTAACCTGCGAATGAAGATCATCAAGAATGACTTCCCCAGCCACCCTCTTTACC
TGGAGGGGGCGCTCACCAGGAGCACCCATTACCAGCAATACCAACCGGTTGTCACCCTGCAGAAGGGCTACAC
CATCCACTGGGACCAGACGGCCCCCGCCGAACTCGCCATCTGGCTCATCAACTTCAACAAGGGCGACTGGATC
CGAGTGGGGCTCTGCTACCCGCGAGGCACCACATTCTCCATCCTCTCGGATGTTCACAATCGCCTGCTGAAGC
AAACGTCCAAGACGGGCGTCTTCGTGAGGACCTTGCAGATGGACAAAGTGGAGCAGAGCTACCCTGGCAGGAG
CCACTACTACTGGGACGAGGACTCAGGGCTGTTGTTCCTGAAGCTGAAAGCTCAGAACGAGAGAGAGAAGTTT
GCTTTCTGCTCCATGAAAGGCTGTGAGAGGATAAAGATTAAAGCTCTGATTCCAAAGAACGCAGGCGTCAGTG
ACTGCACAGCCACAGCTTACCCCAAGTTCACCGAGAGGGCTGTCGTAGACGTGCCGATGCCCAAGAAGCTCTT
TGGTTCTCAGCTGAAAACAAAGGACCATTTCTTGGAGGTGAAGATGGAGAGTTCCAAGCAGCACTTCTTCCAC
CTCTGGAACGACTTCGCTTACATTGAAGTGGATGGGAAGAAGTACCCCAGTTCGGAGGATGGCATCCAGGTGG
TGGTGATTGACGGGAACCAAGGGCGCGTGGTGAGCCACACGAGCTTCAGGAACTCCATTCTGCAAGGCATACC
ATGGCAGCTTTTCAACTATGTGGCGACCATCCCTGACAATTCCATAGTGCTTATGGCATCAAAGGGAAGATAC
GTCTCCAGAGGCCCATGGACCAGAGTGCTGGAAAAGCTTGGGGCAGACAGGGGTCTCAAGTTGAAAGAGCAAA
TGGCATTCGTTGGCTTCAAAGGCAGCTTCCGGCCCATCTGGGTGACACTGGACACTGAGGATCACAAAGCCAA
AATCTTCCAAGTTGTGCCCATCCCTGTGGTGAAGAAGAAGAAGTTGCTCGAGGGC

| | | | |
|---|---|---|---|
| NOV11j, 314361479 | | | |
| Protein Sequence | SEQ ID NO: 136 | 1327 aa | MW at 149436.0kD |

CPDQSPELQPWNPGHDQDHHVHIGQGKTLLLTSSATVYSIHISEGGKLVIKDHDEPIVLRTRHILIDNGGELH
AGSALCPFQGNFTIILYGRADEGIQPDPYYGLKYIGVGKGGALELHGQKKLSWTFLNKTLHPGGMAEGGYFFE
RSWGHRGVIVHVIDPKSGTVIHSDRFDTYRSKKESERLVQYLNAVPDGRILSVAVNDEGSRNLDDMARKAMTK
LGSKHFLHLGFRHPWSFLTVKGNPSSSVEDHTEYHGHRGSAAARVFKLFQTEHGEYFNVSLSSEWVQDVEWTE
WFDHDKVSQTKGGEKISDLWKAHPGKICNRPIDIQATTMDGVNLSTEVVYKKGQDYRFACYDRGRACRSYRVR
FLCGKPVRPKLTVTIDTNVNSTILNLEDNVQSWKPGDTLVIASTDYSMYQAEEFQVLPCRSCAPNQVKVAGKP
MYLHIGEEIDGVDMRAEVGLLSRNIIVMGEMEDKCYPYRNHICNFFDFDTFGGHIKFALGFKAAHLEGTELKH
MGQQLVGQYPIHFHLAGDVDERGGYDPPTYIRDLSIHHTFSRCVTVHGSNGLLIKDVVGYNSLGHCFFTEDGP
EERNTFDHCLGLLVKSGTLLPSDRDSKMCKMITEDSYPGYIPKPRQDCNAVSTFWMANPNNNLINCAAAGSEE
TGFWFIFHHVPTGPSVGMYSPGYSEHIPLGKFYNNRAHSNYRAGMIIDNGVKTTEASAKDKRPFLSIISARYS
PHQDADPLKPREPAIIRHFIAYKNQDHGAWLRGGDVWLDSCRFADNGIGLTLASGGTFPYDDGSKQEIKNSLF
VGESGNVGTEMMDNRIWGPGGLDHSGRTLPIGQNFPIRGIQLYDGPINIQNCTFRKFVALEGRHTSALAFRLN
NAWQSCPHNNVTGIAFEDVPITSRVFFGEPGPWFNQLDMDGDKTSVFHDVDGSVSEYPGSYLTKNGNWLVRHP
DCINVPDWRGAICSGCYAQMYIQAYKTSNLRMKIIKNDFPSHPLYLEGALTRSTHYQQYQPVVTLQKGYTIHW
DQTAPAELAIWLINFNKGDWIRVGLCYPRGTTFSILSDVHNRLLKQTSKTGVFVRTLQMDKVEQSYPGRSHYY
WDEDSGLLFLKLKAQNEREKFAFCSMKGCERIKIKALIPKNAGVSDCTATAYPKFTERAVVDVPMPKKLFGSQ
LKTKDHFLEVKMESSKQHFFHLWNDFAYIEVDGKKYPSSEDGIQVVVIDGNQGRVVSHTSFRNSILQGIPWQL
FNYVATIPDNSIVLMASKGRYVSRGPWTRVLEKLGADRGLKLKEQMAFVGFKGSFRPIWVTLDTEDHKAKIFQ
VVPIPVVKKKKLL

[0352] A ClustalW comparison of the above protein sequences yields the following sequence alignment shown in Table 11B.

TABLE 11B
Comparison of the NOV11 protein sequences.

| | |
|---|---|
| NOV11a | CPDQSPELQPWNPGHDQDHHVHIGQGKTLLLTSSATVYSIHISEGGKLVIKDHDEPIVLR |
| NOV11b | ------------------------------------------------------------ |
| NOV11c | ------------------------------------------------------------ |
| NOV11d | ------------------------------------------------------------ |
| NOV11e | ------------------------------------------------------------ |
| NOV11f | ------------------------------------------------------------ |
| NOV11g | ------------------------------------------------------------ |
| NOV11h | ------------------------------------------------------------ |
| NOV11i | ------------------------------------------------------------ |
| NOV11j | ------------------------------------------------------------ |
| NOV11a | TRHILIDNGGELHAGSALCPFQGNFTIILYGRADEGIQPDPYYGLKYIGVGKGGALELHG |
| NOV11b | ------------------------------------------------------------ |
| NOV11c | ------------------------------------------------------------ |
| NOV11d | ------------------------------------------------------------ |
| NOV11e | ------------------------------------------------------------ |
| NOV11f | ------------------------------------------------------------ |
| NOV11g | ------------------------------------------------------------ |
| NOV11h | ------------------------------------------------------------ |
| NOV11i | ------------------------------------------------------------ |
| NOV11j | ------------------------------------------------------------ |
| NOV11a | QKKLSWTFLNKTLHPGGMAEGGYFFERSWGHRGVIVHVIDPKSGTVIHSDRFDTYRSKKE |
| NOV11b | ------------------------------------------------------------ |
| NOV11c | ------------------------------------------------------------ |
| NOV11d | ------------------------------------------------------------ |
| NOV11e | ------------------------------------------------------------ |
| NOV11f | ------------------------------------------------------------ |
| NOV11g | ------------------------------------------------------------ |
| NOV11h | ------------------------------------------------------------ |
| NOV11i | ------------------------------------------------------------ |
| NOV11j | ------------------------------------------------------------ |
| NOV11a | SERLVQYLNAVPDGRILSVAVNDEGSRNLDDMARKAMTKLGSKMFLHLGFRVEWTEWFDH |
| NOV11b | ------------------------------------------------------------ |
| NOV11c | ------------------------------------------------------------ |
| NOV11d | ------------------------------------------------------------ |
| NOV11e | ------------------------------------------------------------ |
| NOV11f | ------------------------------------------------------------ |
| NOV11g | ------------------------------------------------------------ |
| NOV11h | ------------------------------------------------------------ |
| NOV11i | ------------------------------------------------------------ |
| NOV11j | ------------------------------------------------------------ |
| NOV11a | DKVSQTKGGEKISDLWKAHPGKICNRPIDIQQATTMDGVNLSTEVVYKKGQDYRFACYDR |
| NOV11b | ------------------------------------------------------------ |
| NOV11c | ------------------------------------------------------------ |
| NOV11d | ------------------------------------------------------------ |
| NOV11e | ------------------------------------------------------------ |
| NOV11f | ------------------------------------------------------------ |
| NOV11g | ------------------------------------------------------------ |
| NOV11h | ------------------------------------------------------------ |
| NOV11i | ---------------TGTAHPGKICNRPIDIQATTMDGVNLSTEVVYKKGQDYRFACYDR |
| NOV11j | ------------------------------------------------------------ |
| NOV11a | GRACRSYRVRFLCGKPVRPKLTVTIDTNVNSTILNLEDNVQSWKPGDTLVIASTDYSMYQ |
| NOV11b | ------------------------------------------------------------ |
| NOV11c | ------------------------------------------------------------ |
| NOV11d | ------------------------------------------------------------ |
| NOV11e | ------------------------------------------------------------ |
| NOV11f | ------------------------------------------------------------ |
| NOV11g | ------------------------------------------------------------ |
| NOV11h | ------------------------------------------------------------ |
| NOV11i | GRACRSYRVRFLCGKPVRPKLTVTIDTNVNSTILNLEDNVQSWKPGDTLVIASTDYSMYQ |
| NOV11j | ------------------------------------------------------------ |
| NOV11a | AEEFQVLPCRSCAPNQVKVAGKPMYLHIGEEIDGVDMRAEVGLLSRNIIVMGEMEDKCYP |
| NOV11b | ------------------------------------------------------------ |
| NOV11c | ------------------------------------------------------------ |
| NOV11d | ------------------------------------------------------------ |
| NOV11e | ------------------------------------------------------------ |
| NOV11f | ------------------------------------------------------------ |
| NOV11g | ------------------------------------------------------------ |
| NOV11h | ------------------------------------------------------------ |
| NOV11i | AEEFQVLPCRSCAPNQVKVAGKPMYLHIGEEIDGVDMRAEVGLLSRNIIVMGEMEDKCYP |
| NOV11j | ------------------------------------------------------------ |
| NOV11a | YRNHICNFFDFDTFGGHIKFALGFKAAHLEGTELKHMGQQLVGQYPIHFHLAGDVDERGG |
| NOV11b | ------------------------------------------------------------ |
| NOV11c | ------------------------------------------------------------ |
| NOV11d | ------------------------------------------------------------ |
| NOV11e | ------------------------------------------------------------ |
| NOV11f | ------------------------------------------------------------ |
| NOV11g | ------------------------------------------------------------ |
| NOV11h | ------------------------------------------------------------ |
| NOV11i | YRNHICNFFDFDTFGGHIKFALGFKAAHLEGTELKHMGQQLVGQYPIHFHLAGDVDERGG |
| NOV11j | ------------------------------------------------------------ |
| NOV11a | YDPPTYIRDLSIHHTFSRCVTVHGSNGLLIKDVVGYNSLGHCFFTEDGPEERNTFDHCLG |
| NOV11b | ------------------------------------------------------------ |
| NOV11c | ------------------------------------------------------------ |
| NOV11d | ------------------------------------------------------------ |
| NOV11e | ------------------------------------------------------------ |
| NOV11f | ------------------------------------------------------------ |
| NOV11g | ------------------------------------------------------------ |
| NOV11h | ------------------------------------------------------------ |
| NOV11i | YDPPTYIRDLSIHHTFSRCVTVHGSNGLLIKDVVGYNSLGHCFFTEDGPEERNTFDHCLG |
| NOV11j | ------------------------------------------------------------ |
| NOV11a | LLVKSGTLLPSDRDSKMCKMITEDSYPGYIPKPRQDCNAVSTFWMANPNNNLINCAAAGS |
| NOV11b | -----------------------MYYTISRKHILETHLPQNTQSREGAGPNPGATPPPPP |
| NOV11c | ------------------------------------------------------------ |
| NOV11d | ------------------------------------------------------------ |
| NOV11e | ------------------------------------------------------------ |
| NOV11f | ------------------------------------------------------------ |
| NOV11g | ------------------------------------------------------------ |
| NOV11h | ---------------------------------------MGAAGRQDFLFKANLTISWLT |
| NOV11i | LLVKSGTLLPSDRDSKMCKMITEDSYPGYIPKPRQDCNAVSTFWMANPNNNLINCAAAGS |
| NOV11j | ------------------------------------------------------------ |
| NOV11a | EETGFWFIFHHVPTGPSVGMYSPGYSEHIPLGKFYNNRAHSNYRAGMIIDNGVKTTEASA |
| NOV11b | VPRASRRLTKRLEREDRSTALQPGQQSETLSQKKKRSKNNYAVCLDILIFVLISFFLPLK |
| NOV11c | ------------------------------------------------------------ |
| NOV11d | ------------------------------------------------------------ |
| NOV11e | ------------------------------------------------------------ |
| NOV11f | ------------------------------------------------------------ |
| NOV11g | ------------------------------------------------------------ |
| NOV11h | LTCFPGATSTVAAGCPDQSPELQPWNPGHDQDHHVHIGQGKTLLLTSSATVYSIHISEGG |
| NOV11i | EETGFWFIFHHVPTGPSVGMYSPGYSEHIPLGKFYNNRAHSNYRAGMIIDNGVKTTEASA |
| NOV11j | -----------TRSCPDQSPELQPWNPGHDQDHHVHIGQGKTLLLTSSATVYSIHISEGG |
| NOV11a | KDKRPFLSIISARYSPHQDADPLKPREPAIIRHFIAYKNQDHGAWLRGGDVWLDSCRFAD |
| NOV11b | TPLGETSAAGCPDQSPELQPWNPGHDQDHHVHIGQGKTLLLTSSATVYSIHISEGGKLVI |
| NOV11c | ------------------------------------------------------------ |
| NOV11d | ------------------------------------------------------------ |
| NOV11e | ------------------------------------------------------------ |
| NOV11f | ------------------------------------------------------------ |
| NOV11g | ------------------------------------------------------------ |
| NOV11h | KLVIKDHDEPIVLRTRHILIDNGGELHAGSALCPFQGNFTIILYGRADEGIQPDPYYGLK |
| NOV11i | KDKRPFLSIISARYSPHQDADPLKPREPAIIRHFIAYKNQDHGAWLRGGDVWLDSCRFAD |
| NOV11j | KLVIKDHDEPIVLRTRHILIDNGGELHAGSALCPFQGNFTIILYGRADEGIQPDPYYGLK |
| NOV11a | NGIGLTLASGGTFPYDDGSKQEIKNSLFVGESGNVGTEMMDNRIWGPGGLDHSGRTLPIG |
| NOV11b | KDHDEPIVLRTRHILIDNGGELHAGSALCPFQGNFTIILYGRADEGIQPDPYYGLKYIGV |
| NOV11c | ------------------------------------------------------------ |
| NOV11d | ------------------------------------------------------------ |
| NOV11e | ------------------------------------------------------------ |
| NOV11f | ------------------------------------------------------------ |
| NOV11g | ------------------------------------------------------------ |
| NOV11h | YIGVGKGGALELHGQKKLSWTFLNKTLHPGGMAEGGYFFERSWGHRGVIVHVIDPKSGTV |
| NOV11i | NGIGLTLASGGTFPYDDGSKQEIKNSLFVGESGNVGTEMMDNRIWGPGGLDHSGRTLPIG |
| NOV11j | YIGVGKGGALELHGQKKLSWTFLNKTLHPGGMAEGGYFFERSWGHRGVIVHVIDPKSGTV |
| NOV11a | QNFPTRGTQLYDGPINIQNCTFRKFVALEGRHTSALAFRLNNAWQSCPHNNVTGIAFEDV |
| NOV11b | GKGGALELHGQKKLSWTFLNKTLHPGGMAEGGYFFERSWGHRGVIVHVIDPKSGTVIHSD |
| NOV11c | ------------------------------------------------------------ |
| NOV11d | ------------------------------------------------------------ |
| NOV11e | ------------------------------------------------------------ |
| NOV11f | ------------------------------------------------------------ |
| NOV11g | ------------------------------------------------------------ |
| NOV11h | IHSDRFDTYRSKKESERLVQYLNAVPDGRILSVAVNDEGSRNLDDMARKAMTKLGSKHFL |
| NOV11i | QNFPIRGIQLYDGPINIQNCTFRKFVALEGRHTSALAFRLNNAWQSCPHNNVTGIAFEDV |
| NOV11j | IHSDRFDTYRSKKESERLVQYLNAVPDGRILSVAVNDEGSRNLDDMARKAMTKLGSKHFL |
| NOV11a | PTTSRVFFGEPGPWFNQLDMDGDKTSVFHDVDGSVSEYPGSYLTKNDNWLVRHPDCINVP |
| NOV11b | RFDTYRSKKESERLVQYLNAVPDGRILSVAVNDEGSRNLDDMARKAMTKLGSKHFLHLGF |
| NOV11c | ------------------------------------------------------------ |
| NOV11d | ------------------------------------------------------------ |
| NOV11e | ------------------------------------------------------------ |
| NOV11f | ------------------------------------------------------------ |
| NOV11g | ------------------------------------------------------------ |
| NOV11h | HLGFRHPWSFLTVKGNPSSSVEDHIEYHGHRGSAAARVFKLFQTEHGEYFNVSLSSEWVQ |
| NOV11i | PITSRVFFGEPGPWFNQLDMDGDKTSVFHDVDGSVSEYPGSYLTKNDNWLVRHPDCINVP |
| NOV11j | HLGFRHPWSFLTVKGNPSSSVEDHIEYHGHRGSAAARVFKLFQTEHGEYFNVSLSSEWVQ |
| NOV11a | DWRGAICSGCYAQMYIQAYKTSNLRMKIIKNDFPSHPLYLEGALTRSTHYQQYQPVVTLQ |
| NOV11b | RVEWTEWFDHDKVSQTKGGEKISDLWKAHPGKICNRPIDIQQATTMDGVNLSTEVVYKKG |
| NOV11c | ------------------------------------------------------------ |
| NOV11d | ------------------------------------------------------------ |
| NOV11e | ------------------------------------------------------------ |
| NOV11f | --------DHDKVSQTKGGEKISDLWKAHPGKICNRPIDIQ-ATTMDGVNLSTEVVYKKG |
| NOV11g | -----------------AYKTSNLRMKIIKNDFPSHPLYLEGALTRSTHYQQYQPVVTLQ |
| NOV11h | DVEWTEWFDHDKVSQTKGGEKISDLWKAHPGKICNRPIDIQ-ATTMDGVNLSTEVVYKKG |
| NOV11i | DWRGAICSGCYAQMYIQAYKTSNLRMKIIKNDFPSHPLYLEGALTRSTHYQQYQPVVTLQ |
| NOV11j | DVEWTEWFDHDKVSQTKGGEKISDLWKAHPGKICNRPIDIQ-ATTMDGVNLSTEVVYKKG |
| NOV11a | KGYTIHWDQTAPAELAIWLINFN-KGDWIRVGLCYPRGTTFSILSDVHNRLLKQTSKTGV |
| NOV11b | QDYRFACYDRGRACRSYRVRFLCGKPVRPKLTVTIDTNVNSTILNLEDNVQSWKPGDTLV |
| NOV11c | ------------------------------------------------------CPDQSP |
| NOV11d | ------------------------------------------------------------ |
| NOV11e | ------------------------------------------------------------ |
| NOV11f | QDYRFACYDRGRACRSYRVRFLCGKPVRPKLTVTIDTNVNSTILNLEDNVQSWKPGDTLV |
| NOV11g | KGYTIHWDQTAPAELAIWLINFN-KGDWIRVGLCYPRGTTFSILSDVHNRLLKQTSKTGV |
| NOV11h | QDYRFACYDRGRACRSYRVRFLCGKPVRPKLTVTIDTNVNSTILNLEDNVQSWKPGDTLV |
| NOV11i | KGYTIHWDQTAPAELAIWLINFN-KGDWIRVGLCYPRGTTFSILSDVHNRLLKQTSKTGV |
| NOV11j | QDYRFACYDRGRACRSYRVRFLCGKPVRPKLTVTIDTNVNSTILNLEDNVQSWKPGDTLV |
| NOV11a | FVRTLQMDKVEQSYPGRSHYYWDEDSGLLFLKLKAQNEREKFAFCSMKGCERIKIKALIP |
| NOV11b | IASTDYSMYQAEEFQVLPCRSCAPNQVKVAGKPMYLHIGEEIDGVDMRAEVGLLSRNIIV |
| NOV11c | ELQPWNPGHDQDHHVHIGQGKTLLLTSSATVYSIHISEGGKLVIKDHDEPIVLRTRHILI |
| NOV11d | ------------------------------------------------------------ |
| NOV11e | -------------HVHIGQGKTLLLTSSATVYSIHISEGGKLVIKDHDEPIVLRTRHILI |
| NOV11f | IASTDYSMYQAEEFQVLPCRSCAPNQVKVAGKPMYLHIGEEIDGVDMRAEVGLLSRNIIV |
| NOV11g | FVRTLQMDKVEQSYPGRSHYYWDEDSGLLFLKLKAQNEREKFAFCSMKGCERIKIKALIP |
| NOV11h | IASTDYSMYQAEEFQVLPCRSCAPNQVKVAGKPMYLHIGEEIDGVDMRAEVGLLSRNIIV |
| NOV11i | FVRTLQMDKVEQSYPGRSHYYWDEDSGLLFLKLKAQNEREKFAFCSMKGCERIKIKALIP |
| NOV11j | IASTDYSMYQAEEFQVLPCRSCAPNQVKVAGKPMYLHIGEEIDGVDMRAEVGLLSRNIIV |
| NOV11a | KNAGVSDCTATAYPKFTERAVVDVPMPKKLFGSQLKTKDHFLEVKME-SSKQHFFHLWND |
| NOV11b | MGEMEDKCYPYRNHICNFFDFDTFGGHIKFALGFKAAHLEGTELKHM-GQQLVGQYPIHF |
| NOV11c | DNGGELHAGSALCPFQGNFTIILYGRADEGIQPDPYYGLKYIGVGKGGALELHGQKKLSW |
| NOV11d | ------------------------------------------------------------ |
| NOV11e | DNGGELHAGSALCPFQGNFTIILYGRADEGIQPDPYYGLKYIGVGKGGALELHGQKKLSW |
| NOV11f | MGEMEDKCYPYRNHICNFFDFDTFGGHIKFALGFKAAHLEGTELKHM-GQQLVGQYPIHF |
| NOV11g | KNAGVSDCTATAYPKFTERAVVDVPMPKKLFGSQLKTKDHFLEVKME-SSKQHFFHLWND |
| NOV11h | MGEMEDKCYPYRNHICNFFDFDTFGGHIKFALGFKAAHLEGTELKHM-GQQLVGQYPIHF |
| NOV11i | KNAGVSDCTATAYPKFTERAVVDVPMPKKLFGSQLKTKDHFLEVKME-SSKQHFFHLWND |
| NOV11j | MGEMEDKCYPYRNHICNFFDFDTFGGHIKFALGFKAAHLEGTELKHM-GQQLVGQYPIHF |
| NOV11a | FAYIEVDGK----------KYPSSEDGIQVVVIDGNQGRVVSHTSFRNSILQGIPWQ--- |
| NOV11b | HLAGDVDERGGYDPPTYIRDLSIHHTFSRCVTVHGSNGLLIKDVVGYNSLGHCFFTEDGP |
| NOV11c | TFLNKTLHPGGMAEGGYFFERSWGHRGVIVHVIDPKSGTVIHSDRFDTYRSKKESER--- |
| NOV11d | ------DGK----------KYPSSEDGIQVVVIDGNQGRVVSHTSFRNSILQGIPWQ--- |
| NOV11e | TFLNKTLHPGGMAEGGYFFERSWGHRGVIVHVIDPKSGTVIHSDRFDTYRSKKESER--- |
| NOV11f | HLAGDVDERGGYDPPTYIRDLSIHHTFSRCVTVHGSNGLLIKDVVGYNSLGHCFFTEDGP |
| NOV11g | FAYIEVDGK----------KYPSSEDGIQVVVIDGNQGRVVSHTSFRNSILQGIPWQ--- |
| NOV11h | HLAGDVDERGGYDPPTYIRDLSIHHTFSRCVTVHGSNGLLIKDVVGYNSLGHCFFTEDGP |
| NOV11i | FAYIEVDGK----------KYPSSEDGIQVVVIDGNQGRVVSHTSFRNSILQGIPWQ--- |
| NOV11j | HLAGDVDERGGYDPPTYIRDLSIHHTFSRCVTVHGSNGLLIKDVVGYNSLGHCFFTEDGP |
| NOV11a | ----LFNYVATIPDNSIVLMASKG-----RYVSRGPWTRVLEKLGADRGLKLKEQMA--- |
| NOV11b | EERNTFDHCLGLLVKSGTLLPSDRDSKMCKMITEDSYPGYIPKPRQDCNAVSTFWMANPN |
| NOV11c | ----LVQYLNAVPDGRILSVA--------------------------------------- |
| NOV11d | ----LFNYVATIPDNSIVLMASKG-----RYVSRGPWTRVLEKLGADRGLKLKEQMA--- |
| NOV11e | ----LVQYLNAVPDGRILSVAVNDEG---SRNLDDMARKAMTKLGSKHFLHLGFRHP--- |
| NOV11f | EERNTFDHCLGLLVKSGTLLPSDRDSKMCKMITEDSYPGYIPKPRQDCNAVSTFWMANPN |
| NOV11g | ----LFNYVATIPDNSIVLMASKG-----RYVSRGPWTRVLEKLGADRGLKLKEQMA--- |
| NOV11h | EERNTFDHCLGLLVKSGTLLPSDRDSKMCKMITEDSYPGYIPKPRQDCNAVSTFWMANPN |
| NOV11i | ----LFNYVATIPDNSIVLMASKG-----RYVSRGPWTRVLEKLGADRGLKLKEQMA--- |
| NOV11j | EERNTFDHCLGLLVKSGTLLPSDRDSKMCKMITEDSYPGYIPKPRQDCNAVSTFWMANPN |
| NOV11a | ------------FVGFKGSFRPIWVTLDTEDHKAKIFQVVPIPVVKKKKL---------- |
| NOV11b | NNLINCAAAGSEETGFWFIFHHVPTGPSVGMYSPGYSEHIPLGKFYNNRAHSNYRAGMII |
| NOV11c | ------------------------------------------------------------ |
| NOV11d | ------------FVGFKGSFRPIWVTLDTEDHKAKIFQVVPIPVV--------------- |
| NOV11e | -------------WSFLTVKGNPSSSVEDHIEYHGHRGSAAARVFKLFQT---------- |
| NOV11f | NNLINCAAAGSEETGFWFIFHHVPTGPSVGMYSPGYSEHIPLGKFYNNRAHSNYRAGMII |
| NOV11g | ------------FVGFKGSFRPIWVTLDTEDHKAKIFQVVPIPVVKKKKL---------- |
| NOV11h | NNLINCAAAGSEETGFWFIFHHVPTGPSVGMYSPGYSEHIPLGKFYNNRAHSNYRAGMII |
| NOV11i | ------------FVGFKGSFRPIWVTLDTEDHKAKIFQVVPIPVVKKKKLLEG------- |
| NOV11j | NNLINCAAAGSEETGFWFIFHHVPTGPSVGMYSPGYSEHIPLGKFYNNRAHSNYRAGMII |
| NOV11a | ------------------------------------------------------------ |
| NOV11b | DNGVKTTEASAKDKRPFLSIISARYSPHQDADPLKPREPAIIRHFIAYKNQDHGAWLRGG |
| NOV11c | ------------------------------------------------------------ |
| NOV11d | ------------------------------------------------------------ |
| NOV11e | ------------------------------------------------------------ |
| NOV11f | DNGVKTTEASAKDKRPFLSI---------------------------------------- |
| NOV11g | ------------------------------------------------------------ |
| NOV11h | DNGVKTTEASAKDKRPFLSIISARYSPHQDADPLKPREPAIIRHFIAYKNQDRGAWLRGG |
| NOV11i | ------------------------------------------------------------ |
| NOV11j | DNGVKTTEASAKDKRPFLSIISARYSPHQDADPLKPREPAIIRHFIAYKNQDHGAWLRGG |
| NOV11a | ------------------------------------------------------------ |
| NOV11b | DVWLDSCRFADNGIGLTLASGGTFPYDDGSKQEIKNSLFVGESGNVGTEMMDNRIWGPGG |
| NOV11c | ------------------------------------------------------------ |
| NOV11d | ------------------------------------------------------------ |
| NOV11e | ------------------------------------------------------------ |
| NOV11f | ------------------------------------------------------------ |
| NOV11g | ------------------------------------------------------------ |
| NOV11h | DVWLDSCRFADNGIGLTLASGGTFPYDDGSKQEIKNSLFVGESGNVGTEMMDNRIWGPGG |
| NOV11i | ------------------------------------------------------------ |
| NOV11j | DVWLDSCRFADNGIGLTLASGGTFPYDDGSKQEIKNSLFVGESGNVGTEMMDNRIWGPGG |
| NOV11a | ------------------------------------------------------------ |
| NOV11b | LDHSGRTLPIGQNFPIRGIQLYDGPINIQNCTFRKFVALEGRHTSALAFRLNNAWQSCPH |
| NOV11c | ------------------------------------------------------------ |
| NOV11d | ------------------------------------------------------------ |
| NOV11e | ------------------------------------------------------------ |
| NOV11f | ------------------------------------------------------------ |
| NOV11g | ------------------------------------------------------------ |
| NOV11h | LDHSGRTLPIGQNFPIRGIQLYDGPINILNCTFRKFVALEGRHTSALAFRLNNAWQSCPH |
| NOV11i | ------------------------------------------------------------ |
| NOV11j | LDHSGRTLPIGQNFPIRGIQLYDGPINIQNCTFRKFVALEGRHTSALAFRLNNAWQSCPH |
| NOV11a | ------------------------------------------------------------ |
| NOV11b | NNVTGIAFEDVPITSRVFFGEPGPWFNQLDMDGDKTSVFHDVDGSVSEYPGSYLTKNDNW |
| NOV11c | ------------------------------------------------------------ |
| NOV11d | ------------------------------------------------------------ |
| NOV11e | ------------------------------------------------------------ |
| NOV11f | ------------------------------------------------------------ |
| NOV11g | ------------------------------------------------------------ |
| NOV11h | NNVTGIAFEDVPITSRVFFGEPGPWFNQLDMDGDKTSVFHDVDGSVSEYPGSYLTKNDNW |
| NOV11i | ------------------------------------------------------------ |
| NOV11j | NNVTGIAFEDVPITSRVFFGEPGPWFNQLDMDGDKTSVFHDVDGSVSEYPGSYLTKNGNW |
| NOV11a | ------------------------------------------------------------ |
| NOV11b | LVRHPDCINVPDWRGAICSGCYAQMYIQAYKTSNLRMKIIKNDFPSHPLYLEGALTRSTH |
| NOV11c | ------------------------------------------------------------ |
| NOV11d | ------------------------------------------------------------ |
| NOV11e | ------------------------------------------------------------ |
| NOV11f | ------------------------------------------------------------ |
| NOV11g | ------------------------------------------------------------ |
| NOV11h | LVRHPDCINVPDWRGAICSGCYAQMYIQAYKTSNLRMKIIKNDFPSHPLYLEGALTRSTH |
| NOV11i | ------------------------------------------------------------ |
| NOV11j | LVRHPDCINVPDWRGAICSGCYAQMYIQAYKTSNLRMKIIKNDFPSHPLYLEGALTRSTH |
| NOV11a | ------------------------------------------------------------ |
| NOV11b | YQQYQPVVTLQKGYTIHWDQTAPAELAIWLINFNKGDWIRVGLCYPRGTTFSILSDVHNR |
| NOV11c | ------------------------------------------------------------ |
| NOV11d | ------------------------------------------------------------ |
| NOV11e | ------------------------------------------------------------ |
| NOV11f | ------------------------------------------------------------ |
| NOV11g | ------------------------------------------------------------ |
| NOV11h | YQQYQPVVTLQKGYTIHWDQTAPAELAIWLINFNKGDWIRVGLCYPRGTTFSILSDVHNR |
| NOV11i | ------------------------------------------------------------ |
| NOV11j | YQQYQPVVTLQKGYTIHWDQTAPAELAIWLINFNKGDWIRVGLCYPRGTTFSILSDVHNR |
| NOV11a | ------------------------------------------------------------ |
| NOV11b | LLKQTSKTGVFVRTLQMDKVEQSYPGRSHYYWDEDSGLLFLKLKAQNEREKFAFCSMKGC |
| NOV11c | ------------------------------------------------------------ |
| NOV11d | ------------------------------------------------------------ |
| NOV11e | ------------------------------------------------------------ |
| NOV11f | ------------------------------------------------------------ |
| NOV11g | ------------------------------------------------------------ |
| NOV11h | LLKQTSKTGVFVRTLQMDKVEQSYPGRSHYYWDEDSGLLFLKLKAQNEREKFAFCSMKGC |
| NOV11i | ------------------------------------------------------------ |
| NOV11j | LLKQTSKTGVFVRTLQMDKVEQSYPGRSHYYWDEDSGLLFLKLKAQNEREKFAFCSMKGC |
| NOV11a | ------------------------------------------------------------ |
| NOV11b | ERIKIKALIPKNAGVSDCTATAYPKFTERAVVDVPMPKKLFGSQLKTKDHFLEVKMESSK |
| NOV11c | ------------------------------------------------------------ |
| NOV11d | ------------------------------------------------------------ |
| NOV11e | ------------------------------------------------------------ |
| NOV11f | ------------------------------------------------------------ |
| NOV11g | ------------------------------------------------------------ |
| NOV11h | ERIKIKALIPKNAGVSDCTATAYPKFTERAVVDVPMPKKLFGSQLKTKDHFLEVKMESSK |
| NOV11i | ------------------------------------------------------------ |
| NOV11j | ERIKIKALIPKNAGVSDCTATAYPKFTERAVVDVPMPKKLFGSQLKTKDNFLEVKMESSK |
| NOV11a | ------------------------------------------------------------ |
| NOV11b | QHFFHLWNDFAYIEVDGKKYPSSEDGIQVVVIDGNQGRVVSHTSFRNSILQGIPWQLFNY |
| NOV11c | ------------------------------------------------------------ |
| NOV11d | ------------------------------------------------------------ |
| NOV11e | ------------------------------------------------------------ |
| NOV11f | ------------------------------------------------------------ |
| NOV11g | ------------------------------------------------------------ |
| NOV11h | QHFFHLWNDFAYIEVDGKKYPSSEDGIQVVVIDGNQGRVVSHTSFRNSILQGIPWQLFNY |
| NOV11i | ------------------------------------------------------------ |
| NOV11j | QHFFHLWNDFAYIEVDGKKYPSSEDGIQVVVIDGNQGRVVSHTSFRNSILQGIPWQLFNY |
| NOV11a | ------------------------------------------------------------ |
| NOV11b | VATIPDNSIVLMASKGRYVSRGPWTRVLEKLGADRGLKLKEQMAFVGFKGSFRPIWVTLD |
| NOV11c | ------------------------------------------------------------ |
| NOV11d | ------------------------------------------------------------ |
| NOV11e | ------------------------------------------------------------ |
| NOV11f | ------------------------------------------------------------ |
| NOV11g | ------------------------------------------------------------ |
| NOV11h | VATIPDNSIVLMASKGRYVSRGPWTRVLEKLGADRGLKLKEQMAFVGFKGSFRPIWVTLD |
| NOV11i | ------------------------------------------------------------ |
| NOV11j | VATIPDNSIVLMASKGRYVSRGPWTRVLEKLGADRGLKLKEQMAFVGFKGSFRPIWVTLD |
| NOV11a | ------------------------- |
| NOV11b | TEDHKAKIFQVVPIPVVKKKKL--- |
| NOV11c | ------------------------- |
| NOV11d | ------------------------- |
| NOV11e | ------------------------- |
| NOV11f | ------------------------- |
| NOV11g | ------------------------- |
| NOV11h | TEDHKAKIFQVVPIPVVKKKKL--- |
| NOV11i | ------------------------- |
| NOV11j | TEDHKAKIFQVVPIPVVKKKKLLEG |
| NOV11a | (SEQ ID NO: 118) |
| NOV11b | (SEQ ID NO: 120) |
| NOV11c | (SEQ ID NO: 122) |
| NOV11d | (SEQ ID NO: 124) |
| NOV11e | (SEQ ID NO: 126) |
| NOV11f | (SEQ ID NO: 128) |
| NOV11g | (SEQ ID NO: 130) |
| NOV11h | (SEQ ID NO: 132) |
| NOV11i | (SEQ ID NO: 134) |
| NOV11j | (SEQ ID NO: 136) |

[0353] Further analysis of the NOV11j protein yielded the following properties shown in Table 11C.

TABLE 11C
Protein Sequence Properties NOV11j

| | |
|---|---|
| SignalP | No Known Signal Sequence Predicted |
| analysis: | |
| PSORT II | Psort Results (see Details): |
| analysis: | 74.5%: microbody (peroxisome) |
| | 30.0%: nucleus |
| | 17.2%: lysosome (lumen) |
| | 10.0%: mitochondrial matrix space |
| | Details of Psort Prediction |
| | >>> MUS belongs to the animal class |
| | *** Reasoning Step: 2 |
| | SRCFLG: 1 |
| | Prelim. Calc. of ALOM (thresh: 0.5) count: 0 |
| | McG: Length of UR: 7 |
| | Peak Value of UR: −1.04 |
| | Net Charge of CR: −1 |
| | McG: Discrim Score: −23.99 |
| | GvH: Signal Score (−3.5): 1.65 |
| | Possible site: 39 |
| | >>> Seems to have no N-terminal signal seq. |
| | Amino Acid Composition: calculated from 1 |
| | new cnt: 0 ** thrshld changed to −2 |
| | involving clv. sig in the ALOMREC or not: 0B |
| | ALOM program count: 0 value: 4.51 threshold: −2.0 |
| | PERIPHERAL Likelihood = 4.51 |
| | modified ALOM score: −1.80 |
| | Gavel: Bound. Mitoch. Preseq. R-2 motif: 4 TRSCPD |
| | mtdisc (mit) Status: negative (−8.24) |
| | *** Reasoning Step: 3 |
| | KDEL Count: 0 |
| | Goal mtmx modified Score: 0.10 |
| | SKL motif: pos: 505(1332), count: 1 AHL |
| | pox modified by SKL scr: 0.3 |
| | Poxaac Score: 4.27 |
| | >>> POX Status: positive |
| | pox modified by aac scr: 0.636 |
| | >>> lys: 0.22 Status: notclr |
| | Goal lys: modified. Score: 0.172 |
| | Nuc-4 pos: 1324 (5) KKKK |
| | nuc modified. Score: 0.60 |
| | >>> Nuclear Signal. Status: notclr (0.30) |

[0354] A search of the NOV11j protein against the Geneseq database, a proprietary database that contains sequences published in patents and patent publication, yielded several homologous proteins shown in Table 11D.

TABLE 11D
Geneseq Results for NOV11j

| | | NOV11j | | |
|---|---|---|---|---|
| | | Residues/ | Identities/ | |
| Geneseq | Protein/Organism/Length [Patent #, | Match | Similarities for the | Expect |
| Identifier | Date] | Residues | Matched Region | Value |
| ABR58552 | Human cancer related protein SEQ ID | 1 . . . 1326 | 1322/1323 (99%) | 0.0 |
| | NO: 209 - Homo sapiens, 1361 aa. | 33 . . . 1358 | 1322/1323 (99%) | |
| | [WO2003025138-A2, 27 MAR. 2003] | | | |
| ABU52404 | Human GPCR related protein NOV42b - | 1 . . . 1326 | 1322/1323 (99%) | 0.0 |
| | Homo sapiens, 1361 aa. | 33 . . . 1358 | 1322/1323 (99%) | |
| | [WO200279398-A2, 10 OCT. 2002] | | | |
| ABP54684 | Metastatic colorectal cancer-associated | 1 . . . 1326 | 1322/1323 (99%) | 0.0 |
| | polypeptide - Homo sapiens, 1361 aa. | 33 . . . 1358 | 1322/1323 (99%) | |
| | [WO200268677-A2, 06 SEP. 2002] | | | |

[0355] In a BLAST search of public sequence databases, the NOV11j protein was found to have homology to the proteins shown in the BLASTP data in Table 11E.

TABLE 11E
Public BLASTP Results for NOV11j

| | | NOV11j | | |
|---|---|---|---|---|
| Protein | | Residues/ | Identities/ | |
| Accession | | Match | Similarities for the | Expect |
| Number | Protein/Organism/Length | Residues | Matched Portion | Value |
| Q8BI06y | Hypothetical 110.4 kDa protein | 1..1079 | 998/1075 (92%) | 0.0 |
| | homolog-Mus musculus (Mouse), | 53...1130 | 1039/1075 (96%) | |
| | 1142 aa. | | | |
| Q9ULM1 | Hypothetical protein KIAA1199- | 314..1326 | 1009/1010 (99%) | |
| | Homo sapiens (Human), 1013 aa | 1..1010 | 1009/1010 (99%) | |
| | (fragment). | | | |
| Q8WUL3 | Hypothetical protein-Homo | 1..944 | 939/941 (99%) | |
| | sapiens (Human), 992 aa. | 33.976 | 939/941 (99%) | |

### Example 12

### NOV12, CG88912, Beta-neoendorphin-dynorphin Precursor

[0356] The NOV12 clone was analyzed, and the nucleotide and encoded polypeptide sequences are shown in Table 12A.

TABLE 12A
NOV12 Sequence Analysis

| | | |
|---|---|---|
| NOV12a, CG88912-02 | SEQ ID NO: 137 | 619 bp |
| DNA Sequence | ORF Start: at 1 | ORF Stop: TAA at 604 |

GCTGCCTGCCTCCTCATGTTCCCCTCCACCACAGCGGACTGCCTGTCGCGGTGCTCCTTGTGTGCTGTAAAGA
CCCAGGATGGTCCCAAACCTATCAATCCCCTGATTTGCTCCCTGCAATGCCAGGCTGCCCTGCTGCCCTCTGA
GGAATGGGAGAGATGCCAGAGCTTTCTGTCTTTTTTCACCCCCTCCACCCTTGGGCTCAATGACAAGGAGGAC
TTGGGGAGCAAGTCGGTTGGGGAAGGGCCCTACAGTGAGCTGGCCAAGCTCTCTGGGTCATTCCTGAAGGAGC
TGAACGATGGTGCCATGGAGACTGGCACACTCTATCTCGCTGAGGAGGACCCCAAGGAGCAGGTCAAACGCTA
TGGGGGCTTTTTGCGCAAATACCCCAAGAGGAGCTCAGAGGTGGCTGGGGAGGGGGACGGGGATAGCATGGGC
CATGAGGACCTGTACAAACGCTATGGGGGCTTCTTGCGGCGCATTCGTCCCAAGCTCAAGTGGGACAACCAGA
AGCGCTATGGCGGTTTTCTCCGGCGCCAGTTCAAGGTGGTGACTCGGTCTCAGGAAGATCCGAATGCTTACTC
TGGAGAGCTTTTTGATGCATAAGCACTTCTTTTCA

| | | | |
|---|---|---|---|
| NOV12a, CG88912-02 | | | |
| Protein Sequence | SEQ ID NO: 138 | 201 aa | MW at 22447.1kD |

AACLLMFPSTTADCLSRCSLCAVKTQDGPKPINPLICSLQCQAALLPSEEWERCQSFLSFFTPSTLGLNDKED
LGSKSVGEGPYSELAKLSGSFLKELNDGAMETGTLYLAEEDPKEQVKRYGGFLRKYPKRSSEVAGEGDGDSMG
HEDLYKRYGGFLRRIRPKLKWDNQKRYGGFLRRQFKVVTRSQEDPNAYSGELFDA

| | | |
|---|---|---|
| NOV12b, CG88912-01 | SEQ ID NO: 139 | 758 bp |
| DNA Sequence | ORF Start: ATG at 16 | ORF Stop: TGA at 379 |

TCTGCCTGCCTCCTCATGTTCCCCTCCACCACAGCGGACTGCCTGTCGCGGTGCTCCTTGTGTGCTGTAAAGA
CCCAGGATGGTCCCAAACCTATCAATCCCCTGATTTGCTCCCTGCAATGCCAGGCTGCCCTGCTGCCCTCTGA
GGAATGGGAGAGATGCCAGAGCTTTCTGTCTTTTTTCACCCCCTCCACCCTTGGGCTCAATGACAAGGAGGAC
TTGGGGAGCAAGTCGGTTGGGGAAGGGCCCTACAGTGAGCTGGCCAAGCTCTCTGGGTCATTCCTGAAGGAGC
TGGAGAAAAGCAAGTTTTCTCCCAAGTATCTCAACAAAGGAGAACACTCTGAGCAAGAGCCTGGAGGAGAAGC
TCAGGGGTCTCTCTGACGGGTTTAGGGAGGGAGCAGAGTCTGAGCTGATGAGGGATGCCCAGCTGAACGATGG
TGCCATGGAGACTGGCACACTCTATCTCGCTGAGGAGGACCCCAAGGAGCAGGTCAAACGCTATGGGGGCTTT
TTGCGCAAATACCCCAAGAGGAGCTCAGAGGTGGCTGGGGAGGGGGACGGGGATAGCATGGGCCATGAGGACC
TGTACAAACGCTATGGGGGCTTCTTGCGGCGCATTCGTCCCAAGCTCAAGTGGGACAACCAGAAGCGCTATGG
CGGTTTTCTCCGGCGCCAGTTCAAGGTGGTGACTCGGTCTCAGGAAGATCCGAATGCTTACTCTGGAGAGCTT
TTTGATGCATAAGCACCTCTTTTCATGA

| | | | |
|---|---|---|---|
| NOV12b, CG88912-01 | | | |
| Protein Sequence | SEQ ID NO: 140 | 121 aa | MW at 13107.6kD |

MFPSTTADCLSRCSLCAVKTQDGPKPINPLICSLQCQAALLPSEEWERCQSFLSFFTPSTLGLNDKEDLGSKS
VGEGPYSELAKLSGSFLKELEKSKFSPKYLNKGEHSEQEPGGEAQGSL

| | | |
|---|---|---|
| NOV12c, 310907706 | SEQ ID NO: 141 | 603 bp |
| DNA Sequence | ORF Start: at 1 | ORF Stop: end of sequence |

GCTGCCTGCCTCCTCATGTTCCCCTCCACCACAGCGGACTGCCTGTCGCGGTGCTCCTTGTGTGCTGTAAAGA
CCCAGGATGGTCCCAAACCTATCAATCCCCTGATTTGCTCCCTGCAATGCCAGGCTGCCCTGCTGCCCTCTGA
GGAATGGGAGAGATGCCAGAGCTTTCTGTCTTTTTTCACCCCCTCCACCCTTGGGCTCAATGACAAGGAGGAC
TTGGGGAGCAAGTCGGTTGGGGAAGGGCCCTACAGTGAGCTGGCCAAGCTCTCTGGGTCATTCCTGAAGGAGC
TGAACGATGGTGCCATGGAGACTGGCACACTCTATCTCGCTGAGGAGGACCCCAAGGAGCAGGTCAAACGCTA
TGGGGGCTTTTTGCGCAAATACCCCAAGAGGAGCTCAGAGGTGGCTGGGGAGGGGGACGGGGATAGCATGGGC
CATGAGGACCTGTACAAACGCTATGGGGGCTTCTTGCGGCGCATTCGTCCCAAGCTCAAGTGGGACAACCAGA
AGCGCTATGGCGGTTTTCTCCGGCGCCAGTTCAAGGTGGTGACTCGGTCTCAGGAAGATCCGAATGCTTACTC
TGGAGAGCTTTTTGATGCA

| | | | |
|---|---|---|---|
| NOV12c, 310907706 | | | |
| Protein Sequence | SEQ ID NO: 142 | 201 aa | MW at 22447.4kD |

AACLLMFPSTTADCLSRCSLCAVKTQDGPKPINPLICSLQCQAALLPSEEWERCQSFLSFFTPSTLGLNDKED
LGSKSVGEGPYSELAKLSGSFLKELNDGAMETGTLYLAEEDPKEQVKRYGGFLRKYPKRSSEVAGEGDGDSMG
HEDLYKRYGGFLRRIRPKLKWDNQKRYGGFLRRQFKVVTRSQEDPNAYSGELFDA

[0357] A ClustalW comparison of the above protein sequences yields the following sequence alignment shown in Table 12B.

TABLE 12B
Comparison of the NOV12 protein sequences.

| | |
|---|---|
| NOV12a | ----AACLLMFPSTTADCLSRCSLCAVKTQDGPKPINPLICSLQCQAALLPSEEWERCQS |
| NOV12b | ---------MFPSTTADCLSRCSLCAVKTQDGPKPINPLICSLQCQAALLPSEEWERCQS |
| NOV12c | ----AACLLMFPSTTADCLSRCSLCAVKTQDGPKPINPLICSLQCQAALLPSEEWERCQS |
| NOV12a | FLSFFTPSTLGLNDKEDLGSKSVGEGPYSELAKLSGSFLKELNDGAMETGTLYLAEEDPK |
| NOV12b | FLSFFTPSTLGLNDKEDLGSKSVGEGPYSELAKLSGSFLKELEKSKFSPKYLNKGEHSEQ |
| NOV12c | FLSFFTPSTLGLNDKEDLGSKSVGEGPYSELAKLSGSFLKELNDGAMETGTLYLAEEDPK |
| NOV12a | EQVKRYGGFLRKYPKRSSEVAGEGDGDSMGHEDLYKRYGGFLRRIRPKLKWDNQKRYGGF |
| NOV12b | EPGGEAQGSL-------------------------------------------------- |
| NOV12c | EQVKRYGGFLRKYPKRSSEVAGEGDGDSMGHEDLYKRYGGFLRRIRPKLKWDNQKRYGGF |
| NOV12a | LRRQFKVVTRSQEDPNAYSGELFDA--- |
| NOV12b | ---------------------------- |
| NOV12c | LRRQFKVVTRSQEDPNAYSGELFDA--- |
| NOV12a | (SEQ ID NO: 138) |
| NOV12b | (SEQ ID NO: 140) |
| NOV12c | (SEQ ID NO: 142) |

[0358] Further analysis of the NOV12c protein yielded the following properties shown in Table 12C.

TABLE 12C
Protein Sequence Properties NOV12c

| SignalP | Cleavage site between residues 16 and 17 | | | |
|---|---|---|---|---|
| analysis: | | | | |
| PSORT II | PSG: a new signal peptide prediction method | | | |
| analysis: | N-region: length 0; pos. chg 0; neg. chg 0 | | | |
| | H-region: length 16; peak value 9.99 | | | |
| | PSG score: 5.59 | | | |
| | GvH: von Heijne's method for signal seq. recognition | | | |
| | GvH score (threshold: −2.1): −2.34 | | | |
| | possible cleavage site: between 16 and 17 | | | |
| | >>> Seems to have no N-terminal signal peptide | | | |
| | ALOM: Klein et al's method for TM region allocation | | | |
| | Init position for calculation: 1 | | | |
| | Tentative number of TMS(s) for the threshold 0.5: 0 | | | |
| | number of TMS(s) . . . fixed | | | |
| | PERIPHERAL Likelihood = 4.88 (at 3) | | | |
| | ALOM score: 4.88 (number of TMSs: 0) | | | |
| | MTOP: Prediction of membrane topology (Hartmann et al.) | | | |
| | Center position for calculation: 6 | | | |
| | Charge difference: −1.0 C(0.0)-N(1.0) | | | |
| | N >= C: N-terminal side will be inside | | | |
| | MITDISC: discrimination of mitochondrial targeting seq | | | |
| | R content: | 0 | Hyd Moment(75): | 1.15 |
| | Hyd Moment(95): | 1.14 | G content: | 1 |
| | D/E content: | 1 | S/T content: | 6 |

| | |
|---|---|
| Score: | −4.93 |
| Gavel: prediction of cleavage sites for mitochondrial preseq | |
| R-2 motif at 31 SRC\|SL | |
| NUCDISC: discrimination of nuclear localization signals | |
| pat4: none | |
| pat7: none | |
| bipartite: none | |
| content of basic residues: 13.5% | |
| NLS Score: −0.47 | |
| NNCN: Reinhardt's method for Cytplasmic/Nuclear discrimination | |
| Prediction: nuclear | |
| Reliability: 76.7 | |
| Psort Results (see Details): | |
| 37.0%: outside | |
| 13.2%: microbody (peroxisome) | |
| 10.0%: endoplasmic reticulum (membrane) | |
| 10.0%: endoplasmic reticulum (lumen) | |
| Psort II Results (see Details): | |
| 44.4%: extracellular, including cell wall | |
| 33.3%: mitochondrial | |
| 22.2%: nuclear | |

[0359] A search of the NOV12c protein against the Geneseq database, a proprietary database that contains sequences published in patents and patent publication, yielded several homologous proteins shown in Table 12D.

TABLE 12D
Geneseq Results for NOV12c

| | | NOV12c | Identities/ | |
|---|---|---|---|---|
| | | Residues/ | Similarities for | |
| Geneseq | Protein/Organism/Length [Patent #, | Match | the Matched | Expect |
| Identifier | Date] | Residues | Region | Value |
| ABU99162 | Novel human GPCR related protein | 1 . . . 201 | 201/201 (100%) | 1.3e−107 |
| | NOV19a - Homo sapiens, 201 aa. | 1 . . . 201 | 201/201 (100%) | |
| | [WO200299116-A2, 12 DEC. 2002] | | | |
| AAM79544 | Human protein SEQ ID NO 3190 - | 1 . . . 201 | 119/153 (77%) | 1.2e−54 |
| | Homo sapiens, 256 aa. | 11 . . . 256 | 128/153 (83%) | |
| | [WO200157190-A2, 09 AUG. 2001] | | | |
| AAM78560 | Human protein SEQ ID NO 1222 - | 1 . . . 201 | 119/153 (77%) | 1.2e−54 |
| | Homo sapiens, 254 aa. | 9 . . . 254 | 128/153 (83%) | |
| | [WO200157190-A2, 09 AUG. 2001] | | | |

[0360] In a BLAST search of public sequence databases, the NOV12c protein was found to have homology to the proteins shown in the BLASTP data in Table 12E.

TABLE 12E
Public BLASTP Results for NOV12c

| | | NOV12c | Identities/ | |
|---|---|---|---|---|
| Protein | | Residues/ | Similarities for | |
| Accession | | Match | the Matched | Expect |
| Number | Protein/Organism/Length | Residues | Portion | Value |
| P01213 | Beta-neoendorphin-dynorphin precursor | 1 . . . 201 | 119/153 (77%) | 1.3e−54 |
| | (Proenkephalin B) (Preprodynorphin) | 9 . . . 254 | 128/153 (83%) | |
| | [Contains: Beta-neoendorphin; Dynorphin; | | | |
| | Leu- Enkephalin; Rimorphin; Leumorphin] - | | | |
| | Homo sapiens (Human), 254 aa. | | | |
| P01214 | Beta-neoendorphin-dynorphin precursor | 1 . . . 200 | 91/104 (87%) | 1.9e−44 |
| | (Proenkephalin B) (Preprodynorphin) | 9 . . . 255 | 93/104 (89%) | |
| | [Contains: Beta-neoendorphin; Dynorphin; | | | |
| | Leu- Enkephalin; Rimorphin; Leumorphin] - | | | |
| | Sus scrofa (Pig), 256 aa. | | | |
| Q95104 | Beta-neoendorphin-dynorphin precursor | 1 . . . 200 | 94/125 (75%) | 5.2e−42 |
| | (Proenkephalin B) (Preprodynorphin) | 9 . . . 257 | 101/125 (80%) | |
| | [Contains: Beta-neoendorphin; Dynorphin; | | | |
| | Leu- Enkephalin; Rimorphin; Leumorphin] - | | | |
| | Bos taurus (Bovine), 258 aa. | | | |

[0361] PFam analysis predicts that the NOV12c protein contains the domains shown in the Table 12F. Specific amino acid residues of NOV12c for each domain is shown in column 2, equivalent domains in the other NOV12 proteins of the invention are also encompassed herein.

TABLE 12F
Domain Analysis of NOV12c

| | NOV12c Match Region | | |
|---|---|---|---|
| Pfam Domain | Amino acid residues: | Score | Expect Value |
| Opiods_neuropep | 1 . . . 205 | 399.8 | 2.7e−116 |

### Example B

### Sequencing Methodology and Identification of NOVX Clones

[0362] 1. GeneCalling™ Technology: A method of differential gene expression profiling between two or more samples (Nature Biotechnology 17:198-803 1999) was used to identify NOVX genes. Briefly cDNA was derived from various human samples of whole tissue, primary cells or tissue cultured primary cells or cell lines representing multiple tissue types, normal and diseased states, physiological states, and developmental states from different donors. Samples were obtained as. Cells and cell lines may have been treated with biological or chemical agents that regulate gene expression, for example, growth factors, chemokines or steroids. The cDNA thus derived was then digested with up to as many as 120 pairs of restriction enzymes and pairs of linker-adaptors specific for each pair of restriction enzymes were ligated to the appropriate end. The restriction digestion generates a mixture of unique cDNA gene fragments. Limited PCR amplification is performed with primers homologous to the linker adapter sequence where one primer is biotinylated and the other is fluorescently labeled. The doubly labeled material is isolated and the fluorescently labeled single strand is resolved by capillary gel electrophoresis. A computer algorithm compares the electropherograms from an experimental and control group for each of the restriction digestions. This and additional sequence-derived information is used to predict the identity of each differentially expressed gene fragment using a variety of genetic databases. The identity of the gene fragment is confirmed by additional, gene-specific competitive PCR or by isolation and sequencing of the gene fragment.
[0363] 2. SeqCalling™ Technology: The cDNA thus derived was then sequenced using CuraGen's proprietary SeqCalling technology. Sequence traces were evaluated manually and edited for corrections if appropriate. cDNA sequences from all samples were assembled together, sometimes including public human sequences, using bioinformatic programs to produce a consensus sequence for each assembly. Sequences were included as components for assembly when the extent of identity with another component was at least 95% over 50 bp. Each assembly represents a gene or portion thereof and includes information on variants, such as splice forms single nucleotide polymorphisms (SNPs), insertions, deletions and other sequence variations.
[0364] 3. PathCalling™ Technology: The NOVX nucleic acid sequences are derived by laboratory screening of cDNA library by the two-hybrid approach by methods previously described (Nature 403: 623-627, 2000; U.S. Pat. Nos. 6,057,101 and 6,083,693).
[0365] 4. RACE: Techniques based on the polymerase chain reaction such as rapid amplification of cDNA ends (RACE), were used to isolate or complete the predicted sequence of the cDNA of the invention. Usually multiple clones were sequenced from one or more human samples to derive the sequences for fragments. Various human tissue samples from different donors were used for the RACE reaction. The sequences derived from these procedures were included in the SeqCalling Assembly process described in preceding paragraphs.
[0366] 5. Exon Linking: The NOVX target sequences identified in the present invention were subjected to the exon linking process to confirm the sequence. PCR primers were designed by starting at the most upstream sequence available, for the forward primer, and at the most downstream sequence available for the reverse primer. In each case, the sequence was examined, walking inward from the respective termini toward the coding sequence, until a suitable sequence that is either unique or highly selective was encountered, or, in the case of the reverse primer, until the stop codon was reached. Such primers were designed based on in silico predictions for the full length cDNA, part (one or more exons) of the DNA or protein sequence of the target sequence, or by translated homology of the predicted exons to closely related human sequences from other species. These primers were then employed in PCR amplification based on the following pool of human cDNAs: adrenal gland, bone marrow, brain—amygdala, brain—cerebellum, brain—hippocampus, brain—substantia nigra, brain—thalamus, brain—whole, fetal brain, fetal kidney, fetal liver, fetal lung, heart, kidney, lymphoma—Raji, mammary gland, pancreas, pituitary gland, placenta, prostate, salivary gland, skeletal muscle, small intestine, spinal cord, spleen, stomach, testis, thyroid, trachea, uterus. Usually the resulting amplicons were gel purified, cloned and sequenced to high redundancy. The PCR product derived from exon linking was cloned into the pCR2.1 vector from Invitrogen. The resulting bacterial clone has an insert covering the entire open reading frame cloned into the pCR2.1 vector. The resulting sequences from all clones were assembled with themselves, with other fragments in CuraGen Corporation's database and with public ESTs. Fragments and ESTs were included as components for an assembly when the extent of their identity with another component of the assembly was at least 95% over 50 bp. In addition, sequence traces were evaluated manually and edited for corrections if appropriate. These procedures provide the sequence reported herein.
[0367] 6. Physical Clone: Exons were predicted by homology and the intron/exon boundaries were determined using standard genetic rules. Exons were further selected and refined by means of similarity determination using multiple BLAST (for example, tBlastN, BlastX, and BlastN) searches, and, in some instances, GeneScan and Grail. Expressed sequences from both public and proprietary databases were also added when available to further define and complete the gene sequence. The DNA sequence was then manually corrected for apparent inconsistencies thereby obtaining the sequences encoding the full-length protein.

[0368] The PCR product derived by exon linking, covering the entire open reading frame, was cloned into the pCR2.1 vector from Invitrogen to provide clones used for expression and screening purposes.

### Example C

### Quantitative Expression Analysis of Clones in Various Cells and Tissues

[0369] The quantitative expression of various NOV genes was assessed using microtiter plates containing RNA samples from a variety of normal and pathology-derived cells, cell lines and tissues using real time quantitative PCR (RTQ-PCR) performed on an Applied Biosystems (Foster City, Calif.) ABI PRISM® 7700 or an ABI PRISM® 7900 HT Sequence Detection System.

[0370] RNA integrity of all samples was determined by visual assessment of agarose gel electropherograms using 28S and 18S ribosomal RNA staining intensity ratio as a guide (2:1 to 2.5:1 28s:18s) and the absence of low molecular weight RNAs (degradation products). Control samples to detect genomic DNA contamination included RTQ-PCR reactions run in the absence of reverse transcriptase using probe and primer sets designed to amplify across the span of a single exon.

[0371] RNA samples were normalized in reference to nucleic acids encoding constitutively expressed genes (i.e., β-actin and GAPDH). Alternatively, non-normalized RNA samples were converted to single strand cDNA (sscDNA) using Superscript II (Invitrogen Corporation, Carlsbad, Calif., Catalog No. 18064-147) and random hexamers according to the manufacturer's instructions. Reactions containing up to 10 μg of total RNA in a volume of 20 pi or were scaled up to contain 50 μg of total RNA in a volume of 100 μl and were incubated for 60 minutes at 42° C. sscDNA samples were then normalized in reference to nucleic acids as described above.

[0372] Probes and primers were designed according to Applied Biosystems Primer Express Software package (version I for Apple Computer's Macintosh Power PC) or a similar algorithm using the target sequence as input. Default reaction condition settings and the following parameters were set before selecting primers: 250 nM primer concentration; 58°-60° C. primer melting temperature (Tm) range; 590 C primer optimal Tm; 20 C maximum primer difference (if probe does not have 5′ G, probe Tm must be 100 C greater than primer Tm; and 75 bp to 100 bp amplicon size. The selected probes and primers were synthesized by Synthegen (Houston, Tex.). Probes were double purified by HPLC to remove uncoupled dye and evaluated by mass spectroscopy to verify coupling of reporter and quencher dyes to the 5′ and 3′ ends of the probe, respectively. Their final concentrations were: 900 nM forward and reverse primers, and 200 nM probe.

[0373] Normalized RNA was spotted in individual wells of a 96 or 384-well PCR plate (Applied Biosystems, Foster City, Calif.). PCR cocktails included a single gene-specific probe and primers set or two multiplexed probe and primers sets. PCR reactions were done using TaqMan® One-Step RT-PCR Master Mix (Applied Biosystems, Catalog No. 4313803) following manufacturer's instructions. Reverse transcription was performed at 48° C. for 30 minutes followed by amplification/PCR cycles: 95° C. 10 min, then 40 cycles at 950 C for 15 seconds, followed by 60° C. for 1 minute. Results were recorded as CT values (cycle at which a given sample crosses a threshold level of fluorescence) and plotted using a log scale, with the difference in RNA concentration between a given sample and the sample with the lowest CT value being represented as 2 to the power of delta CT. The percent relative expression was the reciprocal of the RNA difference multiplied by 100. CT values below 28 indicate high expression, between 28 and 32 indicate moderate expression, between 32 and 35 indicate low expression and above 35 reflect levels of expression that were too low to be measured reliably.

[0374] Normalized sscDNA was analyzed by RTQ-PCR using 1×TaqMan® Universal Master mix (Applied Biosystems; catalog No. 4324020), following the manufacturer's instructions. PCR amplification and analysis were done as described above.

[0375] Panels 1, 1.1, 1.2, and 1.3D

[0376] Panels 1, 1.1, 1.2 and 1.3D included 2 control wells (genomic DNA control and chemistry control) and 94 wells of cDNA samples from cultured cell lines and primary normal tissues. Cell lines were derived from carcinomas (ca) including: lung, small cell (s cell var), non small cell (non-s or non-sm); breast; melanoma; colon; prostate; glioma (glio), astrocytoma (astro) and neuroblastoma (neuro); squamous cell (squam); ovarian; liver; renal; gastric and pancreatic from the American Type Culture Collection (ATCC, Bethesda, Md.). Normal tissues were obtained from individual adults or fetuses and included: adult and fetal skeletal muscle, adult and fetal heart, adult and fetal kidney, adult and fetal liver, adult and fetal lung, brain, spleen, bone marrow, lymph node, pancreas, salivary gland, pituitary gland, adrenal gland, spinal cord, thymus, stomach, small intestine, colon, bladder, trachea, breast, ovary, uterus, placenta, prostate, testis and adipose. The following abbreviations are used in reporting the results: metastasis (met); pleural effusion (pl. eff or pl effusion) and * indicates established from metastasis.

[0377] General_screening_panel_v1.4, v1.5, v1.6 and v1.7

[0378] Panels 1.4, 1.5, 1.6 and 1.7 were as described for Panels 1, 1.1, 1.2 and 1.3D, above except that normal tissue samples were pooled from 2 to 5 different adults or fetuses.

[0379] Panels 2D, 2.2, 2.3 and 2.4

[0380] Panels 2D, 2.2, 2.3 and 2.4 included 2 control wells and 94 wells containing RNA or cDNA from human surgical specimens procured through the National Cancer Institute's Cooperative Human Tissue Network (CHTN) or the National Disease Research Initiative (NDR1), Ardais (Lexington, Mass.) or Clinomics BioSciences (Frederick, Md.). Tissues included human malignancies and in some cases matched adjacent normal tissue (NAT). Information regarding histopathological assessment of tumor differentiation grade as well as the clinical stage of the patient from which samples were obtained was generally available. Normal tissue RNA and cDNA samples were purchased from various commercial sources such as Clontech (Palo Alto, Calif.), Research Genetics and Invitrogen (Carlsbad, Calif.).

[0381] HASS Panel v 1.0

[0382] The HASS Panel v1.0 included 93 cDNA samples and two controls including: 81 samples of cultured human cancer cell lines subjected to serum starvation, acidosis and anoxia according to established procedures for various lengths of time; 3 human primary cells; 9 malignant brain cancers (4 medulloblastomas and 5 glioblastomas); and 2 controls. Cancer cell lines (ATCC) were cultured using recommended conditions and included: breast, prostate, bladder, pancreatic and CNS. Primary human cells were obtained from Clonetics (Walkersville, Md.). Malignant brain samples were gifts from the Henry Ford Cancer Center.

[0383] ARDAIS Panel v1.0 and v1.1

[0384] The ARDAIS Panel v1.0 and v1.1 included 2 controls and 22 test samples including: human lung adenocarcinomas, lung squamous cell carcinomas, and in some cases matched adjacent normal tissues (NAT) obtained from Ardais (Lexington, Mass.). Unmatched malignant and non-malignant RNA samples from lungs with gross histopathological assessment of tumor differentiation grade and stage and clinical state of the patient were obtained from Ardais.

[0385] ARDAIS Prostate v1.0

[0386] ARDAIS Prostate v1.0 panel included 2 controls and 68 test samples of human prostate malignancies and in some cases matched adjacent normal tissues (NAT) obtained from Ardais (Lexington, Mass.). RNA from unmatched malignant and non-malignant prostate samples with gross histopathological assessment of tumor differentiation grade and stage and clinical state of the patient were also obtained from Ardais.

[0387] ARDAIS Kidney v1.0

[0388] ARDAIS Kidney v1.0 panel included 2 control wells and 44 test samples of human renal cell carcinoma and in some cases matched adjacent normal tissue (NAT) obtained from Ardais (Lexington, Mass.). RNA from unmatched renal cell carcinoma and normal tissue with gross histopathological assessment of tumor differentiation grade and stage and clinical state of the patient were also obtained from Ardais.

[0389] ARDAIS Breast v1.0

[0390] ARDAIS Breast v1.0 panel included 2 control wells and 71 test samples of human breast malignancies and in some cases matched adjacent normal tissue (NAT) obtained from Ardais (Lexington, Mass.). RNA from unmatched malignant and non-malignant breast samples with gross histopathological assessment of tumor differentiation grade and stage and clinical state of the patient were also obtained from Ardais.

[0391] Panel 3D, 3.1 and 3.2

[0392] Panels 3D, 3.1, and 3.2 included two controls, 92 cDNA samples of cultured human cancer cell lines and 2 samples of human primary cerebellum. Cell lines (ATCC, National Cancer Institute (NCI), German tumor cell bank) were cultured as recommended and were derived from: squamous cell carcinoma of the tongue, melanoma, sarcoma, leukemia, lymphoma, and epidermoid, bladder, pancreas, kidney, breast, prostate, ovary, uterus, cervix, stomach, colon, lung and CNS carcinomas.

[0393] Panels 4D, 4R, and 4.1D

[0394] Panels 4D, 4R, and 4.1 D included 2 control wells and 94 test samples of RNA (Panel 4R) or cDNA (Panels 4D and 4.1 D) from human cell lines or tissues related to inflammatory conditions. Controls included total RNA from normal tissues such as colon, lung (Stratagene, La. Jolla, Calif.), thymus and kidney (Clontech, Palo Alto, Calif.). Total RNA from cirrhotic and lupus kidney was obtained from BioChain Institute, Inc., (Hayward, Calif.). Crohn's intestinal and ulcerative colitis samples were obtained from the National Disease Research Interchange (NDR1, Philadelphia, Pa.). Cells purchased from Clonetics (Walkersville, Md.) included: astrocytes, lung fibroblasts, dermal fibroblasts, coronary artery smooth muscle cells, small airway epithelium, bronchial epithelium, microvascular dermal endothelial cells, microvascular lung endothelial cells, human pulmonary aortic endothelial cells, and human umbilical vein endothelial. These primary cell types were activated by incubating with various cytokines (IL-1 beta˜1-5 ng/ml, TNF alpha ˜5-10 ng/ml, IFN gamma ˜20-50 ng/ml, IL-4˜5-10 ng/ml, IL-9˜5-10 ng/ml, IL-13 5-10 ng/ml) or combinations of cytokines as indicated. Starved endothelial cells were cultured in the basal media (Clonetics, Walkersville, Md.) with 0.1% serum.

[0395] Mononuclear cells were prepared from blood donations using Ficoll. LAK cells were cultured in culture media [DMEM, 5% FCS (Hyclone, Logan, Utah), 100 mM non essential amino acids (Gibco/Life Technologies, Rockville, Md.), 1 mM sodium pyruvate (Gibco), mercaptoethanol 5.5×10⁻⁵ M (Gibco), and 10 mM Hepes (Gibco)] and interleukin 2 for 4-6 days. Cells were activated with 10-20 ng/ml PMA and 1-2 μg/ml ionomycin, 5-10 ng/ml IL-12, 20-50 ng/ml IFN gamma or 5-10 ng/ml IL-18 for 6 hours. In some cases, mononuclear cells were cultured for 4-5 days in culture media with ˜5 mg/ml PHA (phytohemagglutinin) or PWM (pokeweed mitogen; Sigma-Aldrich Corp., St. Louis, Mo.). Samples were taken at 24, 48 and 72 hours for RNA preparation. MLR (mixed lymphocyte reaction) samples were obtained by taking blood from two donors, isolating the mononuclear cells using Ficoll and mixing them 1:1 at a final concentration of −2×10⁶ cells/ml in culture media. The MLR samples were taken at various time points from 1-7 days for RNA preparation.

[0396] Monocytes were isolated from mononuclear cells using CD14 Miltenyi Beads, +ve VS selection columns and a Vario Magnet (Miltenyi Biotec, Auburn, Calif.) according to the manufacturer's instructions. Monocytes were differentiated into dendritic cells by culturing in culture media with 50 ng/ml GMCSF and 5 ng/ml IL-4 for 5-7 days. Macrophages were prepared by culturing monocytes for 5-7 days in culture media with ˜50 ng/ml 10% type AB Human Serum (Life technologies, Rockville, Md.) or MCSF (Macrophage colony stimulating factor; R&D, Minneapolis, Minn.). Monocytes, macrophages and dendritic cells were stimulated for 6 or 12-14 hours with 100 ng/ml lipopolysaccharide (LPS). Dendritic cells were also stimulated with 10 μg/ml anti-CD40 monoclonal antibody (Pharmingen, San Diego, Calif.) for 6 or 12-14 hours.

[0397] CD4+ lymphocytes, CD8+ lymphocytes and NK cells were also isolated from mononuclear cells using CD4, CD8 and CD56 Miltenyi beads, positive VS selection columns and a Vario Magnet (Miltenyi Biotec, Auburn, Calif.) according to the manufacturer's instructions. CD45+RA and CD45+RO CD4+ lymphocytes were isolated by depleting mononuclear cells of CD8+, CD56+, CD14+ and CD19+ cells using CD8, CD56, CD14 and CD19 Miltenyi beads and positive selection. CD45RO Miltenyi beads were then used to separate the CD45+RO CD4+ lymphocytes from CD45+RA CD4+ lymphocytes. CD45+RA CD4+, CD45+ RO CD4+ and CD8+ lymphocytes were cultured in culture media at 10⁶ cells/ml in culture plates precoated overnight with 0.5 mg/ml anti-CD28 (Pharmingen, San Diego, Calif.) and 3 μg/ml anti-CD3 (OKT3, ATCC) in PBS. After 6 and 24 hours, the cells were harvested for RNA preparation. To prepare chronically activated CD8+ lymphocytes, isolated CD8+ lymphocytes were activated for 4 days on anti-CD28, anti-CD3 coated plates and then harvested and expanded in culture media with IL-2 (1 ng/ml). These CD8+ cells were activated again with plate bound anti-CD3 and anti-CD28 for 4 days and expanded as described above. RNA was isolated 6 and 24 hours after the second activation and after 4 days of the second expansion culture. Isolated NK cells were cultured in culture media with 1 ng/ml IL-2 for 4-6 days before RNA was prepared.

[0398] B cells were prepared from minced and sieved tonsil tissue (NDRI). Tonsil cells were pelleted and resupended at 10 cells/ml in culture media. Cells were activated using 5 μg/ml PWM (Sigma-Aldrich Corp., St. Louis, Mo.) or ˜10 μg/ml anti-CD40 (Pharmingen, San Diego, Calif.) and 5-10 ng/ml IL-4. Cells were harvested for RNA preparation after 24, 48 and 72 hours.

[0399] To prepare primary and secondary Th1/Th2 and Tr1 cells, umbilical cord blood CD4+lymphocytes (Poietic Systems, German Town, Md.) were cultured at 10⁵-10⁶cells/ml in culture media with IL-2 (4 ng/ml) in 6-well Falcon plates (precoated overnight with 10 μg/ml anti-CD28 (Pharmingen) and 2 μg/ml anti-CD3 (OKT3; ATCC) then washed twice with PBS).

[0400] To stimulate Th1 phenotype differentiation, IL-12 (5 ng/ml) and anti-IL4 (1 μg/ml) were used; for Th2 phenotype differentiation, IL-4 (5 ng/ml) and anti-IFN gamma (1 μg/ml) were used; and for Tr1 phenotype differentiation, IL-10 (5 ng/ml) was used. After 4-5 days, the activated Th1, Th2 and Tr1 lymphocytes were washed once with DMEM and expanded for 4-7 days in culture media with IL-2 (1 ng/ml). Activated Th1, Th2 and Tr1 lymphocytes were re-stimulated for 5 days with anti-CD28/CD3 and cytokines as described above with the addition of anti-CD95L (1 μg/ml) to prevent apoptosis. After 4-5 days, the Th1, Th2 and Tr1 lymphocytes were washed and expanded in culture media with IL-2 for 4-7 days. Activated Th1 and Th2 lymphocytes were maintained for a maximum of three cycles. RNA was prepared from primary and secondary Th1, Th2 and Tr1 after 6 and 24 hours following the second and third activations with plate-bound anti-CD3 and anti-CD28 mAbs and 4 days into the second and third expansion cultures.

[0401] Leukocyte cells lines Ramos, EOL-1, KU-812 were obtained from the ATCC. EOL-1 cells were further differentiated by culturing in culture media at 5×10⁵ cells/ml with 0.1 mM dbcAMP for 8 days, changing the media every 3 days and adjusting the cell concentration to 5×10⁵ cells/ml. RNA was prepared from resting cells or cells activated with PMA (10 ng/ml) and ionomycin (1 μg/ml) for 6 and 14 hours. RNA was prepared from resting CCD 1106 keratinocyte cell line (ATCC) or from cells activated with ˜5 ng/ml TNF alpha and 1 ng/ml IL-1 beta. RNA was prepared from resting NC1-H292, airway epithelial tumor cell line (ATCC) or from cells activated for 6 and 14 hours in culture media with 5 ng/ml IL-4, 5 ng/ml IL-9, 5 ng/ml IL-13, and 25 ng/ml IFN gamma.

[0402] RNA was prepared by lysing approximately 10⁷ cells/ml using Trizol (Gibco BRL) then adding 1/10 volume of bromochloropropane (Molecular Research Corporation, Cincinnati, Ohio), vortexing, incubating for 10 minutes at room temperature and then spinning at 14,000 rpm in a Sorvall SS34 rotor. The aqueous phase was placed in a 15 ml Falcon Tube and an equal volume of isopropanol was added and left at −200 C overnight. The precipitated RNA was spun down at 9,000 rpm for 15 min and washed in 70% ethanol. The pellet was redissolved in 300 μl of RNAse-free water with 35 ml buffer (Promega, Madison, Wis.) 5 μl DTT, 7 μl RNAsin and 8 μl DNAse and incubated at 370 C for 30 minutes to remove contaminating genomic DNA, extracted once with phenol chloroform and re-precipitated with 1/10 volume of 3 M sodium acetate and 2 volumes of 100% ethanol. The RNA was spun down, placed in RNAse free water and stored at −80° C.

[0403] Al_Comprehensive Panel_v1.0

[0404] Autoimmunity (Al) comprehensive panel v1.0 included two controls and 89 cDNA test samples isolated from male (M) and female (F) surgical and postmortem human tissues that were obtained from the Backus Hospital and Clinomics (Frederick, Md.). Tissue samples included: normal, adjacent (Adj); matched normal adjacent (match control); joint tissues (synovial (Syn) fluid, synovium, bone and cartilage, osteoarthritis (OA), rheumatoid arthritis (RA)); psoriatic; ulcerative colitis colon; Crohns disease colon; and emphysmatic, asthmatic, allergic and chronic obstructive pulmonary disease (COPD) lung.

[0405] Pulmonary and General Inflammation (PGI) Panel v1.0

[0406] Pulmonary and General inflammation (PGI) panel v1.0 included two controls and 39 test samples isolated as surgical or postmortem samples. Tissue samples include: five normal lung samples obtained from Maryland Brain and Tissue Bank, University of Maryland (Baltimore, Md.), International Bioresource systems, IBS (Tuscon, Ariz.), and Asterand (Detroit, Mich.), five normal adjacent intestine tissues (NAT) from Ardais (Lexington, Mass.), ulcerative colitis samples (UC) from Ardais (Lexington, Mass.); Crohns disease colon from NDRI, National Disease Research Interchange (Philadelphia, Pa.); emphysematous tissue samples from Ardais (Lexington, Mass.) and Genomic Collaborative Inc. (Cambridge, Mass.), asthmatic tissue from Maryland Brain and Tissue Bank, University of Maryland (Baltimore, Md.) and Genomic Collaborative Inc (Cambridge, Mass.) and fibrotic tissue from Ardais (Lexinton, Mass.) and Genomic Collaborative (Cambridge, Mass.).

[0407] Cellular OA/RA Panel

[0408] Cellular OA.RA panel includes 2 control wells and 35 test samples comprised of cDNA generated from total RNA isolated from human cell lines or primary cells representative of the human joint and its inflammatory condition. Cell types included normal human osteoblasts (Nhost) from Clonetics (Cambrex, East Rutherford, N.J.), human chondrosarcoma SW1353 cells from ATCC (Manossas, Va.)), human fibroblast-like synoviocytes from Cell Applications, Inc. (San Diego, Calif.) and MH7A cell line (a rheumatoid fibroblast-like synoviocytes transformed with SV40 T antigen) from Riken Cell bank (Tsukuba Science City, Japan). These cell types were activated by incubating with various cytokines (IL-1 beta˜1-10 ng/ml, TNF alpha˜5-50 ng/ml, or prostaglandin E2 for Nhost cells) for 1, 6, 18 or 24 h. All these cells were starved for at least 5 h and cultured in their corresponding basal medium with ˜0.1 to 1% FBS.

[0409] Minitissue OA/RA Panel

[0410] The OA/RA mini panel includes two control wells and 31 test samples comprised of cDNA generated from total RNA isolated from surgical and postmortem human tissues obtained from the University of Calgary (Alberta, Canada), NDRI (Philadelphia, Pa.), and Ardais Corporation (Lexington, Mass.). Joint tissue samples include synovium, bone and cartilage from osteoarthritic and rheumatoid arthritis patients undergoing reconstructive knee surgery, as well as, normal synovium samples (RNA and tissue). Visceral normal tissues were pooled from 2-5 different adults and included adrenal gland, heart, kidney, brain, colon, lung, stomach, small intestine, skeletal muscle, and ovary.

[0411] Al.05 Chondrosarcoma

[0412] Al.05 chondrosarcoma plates included SW1353 cells (ATCC) subjected to serum starvation and treated for 6 and 18 h with cytokines that are known to induce MMP (1, 3 and 13) synthesis (e.g. IL1 beta). These treatments included: IL-1 beta (10 ng/ml), IL-1 beta+TNF-alpha (50 ng/ml), IL-1 beta+Oncostatin (50 ng/ml) and PMA (100 ng/ml). Supernatants were collected and analyzed for MMP 1, 3 and 13 production. RNA was prepared from these samples using standard procedures.

[0413] Panels 5D and 51

[0414] Panel 5D and 51 included two controls and cDNAs isolated from human tissues, human pancreatic islets cells, cell lines, metabolic tissues obtained from patients enrolled in the Gestational Diabetes study (described below), and cells from different stages of adipocyte differentiation, including differentiated (AD), midway differentiated (AM), and undifferentiated (U; human mesenchymal stem cells).

[0415] Gestational Diabetes study subjects were young (18-40 years), otherwise healthy women with and without gestational diabetes undergoing routine (elective) Caesarean section. Uterine wall smooth muscle (UT), visceral (Vis) adipose, skeletal muscle (SK), placenta (PI) greater omentum adipose (GO Adipose) and subcutaneous (SubQ) adipose samples (less than 1 cc) were collected, rinsed in sterile saline, blotted and flash frozen in liquid nitrogen. Patients included: Patient 2, an overweight diabetic Hispanic not on insulin; Patient 7-9, obese non-diabetic Caucasians with body mass index (BMI) greater than 30; Patient 10, an overweight diabetic Hispanic, on insulin; Patient 11, an overweight nondiabetic African American; and Patient 12, a diabetic Hispanic on insulin.

[0416] Differentiated adipocytes were obtained from induced donor progenitor cells (Clonetics, Walkersville, Md.). Differentiated human mesenchymal stem cells (HuMSCs) were prepared as described in Mark F. Pittenger, et al., Multilineage Potential of Adult Human Mesenchymal Stem Cells Science Apr 2 1999:143-147. mRNA was isolated and sscDNA was produced from Trizol lysates or frozen pellets. Human cell lines (ATCC, NCI or German tumor cell bank) included: kidney proximal convoluted tubule, uterine smooth muscle cells, small intestine, liver HepG2 cancer cells, heart primary stromal cells and adrenal cortical adenoma cells. Cells were cultured, RNA extracted and sscDNA was produced using standard procedures.

[0417] Panel 5 l also contains pancreatic islets (Diabetes Research Institute at the University of Miami School of Medicine).

[0418] Human Metabolic RTQ-PCR Panel

[0419] Human Metabolic RTQ-PCR Panel included two controls (genomic DNA control and chemistry control) and 211 cDNAs isolated from human tissues and cell lines relevant to metabolic diseases. This panel identifies genes that play a role in the etiology and pathogenesis of obesity and/or diabetes. Metabolic tissues including placenta (PI), uterine wall smooth muscle (Ut), visceral adipose, skeletal muscle (Sk) and subcutaneous (SubQ) adipose were obtained from the Gestational Diabetes study (described above). Included in the panel are: Patients 7 and 8, obese non-diabetic Caucasians; Patient 12 a diabetic Caucasian with unknown BMI, on insulin (treated); Patient 13, an overweight diabetic Caucasian, not on insulin (untreated); Patient 15, an obese, untreated, diabetic Caucasian; Patient 17 and 25, untreated diabetic Caucasians of normal weight; Patient 18, an obese, untreated, diabetic Hispanic; Patient 19, a non-diabetic Caucasian of normal weight; Patient 20, an overweight, treated diabetic Caucasian; Patient 21 and 23, overweight non-diabetic Caucasians; Patient 22, a treated diabetic Caucasian of normal weight; Patient 23, an overweight non-diabetic Caucasian; and Patients 26 and 27, obese, treated, diabetic Caucasians.

[0420] Total RNA was isolated from metabolic tissues including: hypothalamus, liver, pancreas, pancreatic islets, small intestine, psoas muscle, diaphragm muscle, visceral (Vis) adipose, subcutaneous (SubQ) adipose and greater omentum (Go) from 12 Type II diabetic (Diab) patients and 12 non diabetic (Norm) at autopsy. Control diabetic and non-diabetic subjects were matched where possible for: age; sex, male (M); female (F); ethnicity, Caucasian (CC); Hispanic (HI); African American (AA); Asian (AS); and BMI, 20-25 (Low BM), 26-30 (Med BM) or overweight (Overwt), BMI greater than 30 (Hi BMI) (obese).

[0421] RNA was extracted and ss cDNA was produced from cell lines (ATCC) by standard methods.

[0422] CNS Panels

[0423] CNS Panels CNSD.01, CNS Neurodegeneration V1.0 and CNS Neurodegeneration V2.0 included two controls and 46 to 94 test cDNA samples isolated from postmortem human brain tissue obtained from the Harvard Brain Tissue Resource Center (McLean Hospital). Brains were removed from calvaria of donors between 4 and 24 hours after death, and frozen at −800 C in liquid nitrogen vapor.

[0424] Panel CNSD.01

[0425] Panel CNSD.01 included two specimens each from: Alzheimer's disease, Parkinson's disease, Huntington's disease, Progressive Supernuclear Palsy (PSP), Depression, and normal controls. Collected tissues included: cingulate gyrus (Cing Gyr), temporal pole (Temp Pole), globus palladus (Glob palladus), substantia nigra (Sub Nigra), primary motor strip (Brodman Area 4), parietal cortex (Brodman Area 7), prefrontal cortex (Brodman Area 9), and occipital cortex (Brodman area 17). Not all brain regions are represented in all cases.

[0426] Panel CNS Neurodegeneration V1.0

[0427] The CNS Neurodegeneration V1.0 panel included: six Alzheimer's disease (AD) brains and eight normals which included no dementia and no Alzheimer's like pathology (control) or no dementia but evidence of severe Alzheimer's like pathology (Control Path), specifically senile plaque load rated as level 3 on a scale of 0-3; 0 no evidence of plaques, 3 severe AD senile plaque load. Tissues collected included: hippocampus, temporal cortex (Brodman Area 21), parietal cortex (Brodman area 7), occipital cortex (Brodman area 17) superior temporal cortex (Sup Temporal Ctx) and inferior temporal cortex (Inf Temproal Ctx).

[0428] Gene expression was analyzed after normalization using a scaling factor calculated by subtracting the Well mean (CT average for the specific tissue) from the Grand mean (average CT value for all wells across all runs). The scaled CT value is the result of the raw CT value plus the scaling factor.

[0429] Panel CNS Neurodegeneration V2.0

[0430] The CNS Neurodegeneration V2.0 panel included sixteen cases of Alzheimer's disease (AD) and twenty-nine normal controls (no evidence of dementia prior to death) including fourteen controls (Control) with no dementia and no Alzheimer's like pathology and fifteen controls with no dementia but evidence of severe Alzheimer's like pathology (AH3), specifically senile plaque load rated as level 3 on a scale of 0-3; 0 no evidence of plaques, 3 severe AD senile plaque load. Tissues from the temporal cortex (Brodman Area 21) included the inferior and superior temporal cortex that was pooled from a given individual (Inf & Sup Temp Ctx Pool).

[0431] A. NOV1, CG101729-O₂: FGFR4 Variant.

[0432] Expression of gene CG101729-02 was assessed using the primer-probe sets Ag4038, Ag4044 and Ag7932, described in Tables M, AB and AC. Results of the RTQ-PCR runs are shown in Tables AD, AE, AF and AG. CG101729-02 represents a full-length physical clone.

TABLE AA
Probe Name Ag4038

| | | | Start | SEQ |
|---|---|---|---|---|
| Primers | Sequences | Length | Position | ID No |
| Forward | 5′-ctgaagcacatcgtcatc | 21 | 866 | 143 |
| | aac-3′ | | | |
| Probe | TET-5′-cggtttcccctatg | 26 | 907 | 144 |
| | tgcaagtcctaa-3′-TAMRA | | | |
| Reverse | 5′-ctccacctctgagctatt | 22 | 943 | 145 |
| | gatg-3′ | | | |

[0433] TABLE AB
Probe Name Ag4044

| | | | Start | SEQ |
|---|---|---|---|---|
| Primers | Sequences | Length | Position | ID No |
| Forward | 5′-cgtcaagatgctcaaaga | 22 | 1480 | 146 |
| | caac-3′ | | | |
| Probe | TET-5′-ctctgacaaggacc | 24 | 1504 | 147 |
| | tggccgacct-3′-TAMRA | | | |
| Reverse | 5′-gatcagcttcatcacctc | 21 | 1538 | 148 |
| | cat-3′ | | | |

[0434] TABLE AC
Probe Name Ag7932

| | | | Start | SEQ |
|---|---|---|---|---|
| Primers | Sequences | Length | Position | ID No |
| Forward | 5′-cgtgcgtctctcctcca- | 17 | 1332 | 149 |
| | 3′ | | | |
| Probe | TET-5′-cttcccaagcacca | 21 | 1370 | 150 |
| | gcgaggc-3′-TAMRA | | | |
| Reverse | 5′-cacgtactacctggccaa | 20 | 1408 | 151 |
| | ag-3′ | | | |

[0435] TABLE AD
AI comprehensive panel v1.0

| Tissue Name | A | B |
|---|---|---|
| 110967 COPD-F | 2.6 | 0.5 |
| 110980 COPD-F | 0.5 | 2.8 |
| 110968 COPD-M | 2.2 | 0.3 |
| 110977 COPD-M | 11.3 | 7.5 |
| 110989 Emphysema-F | 5.1 | 3.7 |
| 110992 Emphysema-F | 11.4 | 2.3 |
| 110993 Emphysema-F | 0.9 | 1.2 |
| 110994 Emphysema-F | 0.0 | 0.9 |
| 110995 Emphysema-F | 19.1 | 8.3 |
| 110996 Emphysema-F | 3.7 | 2.9 |
| 110997 Asthma-M | 1.3 | 0.0 |
| 111001 Asthma-F | 2.7 | 2.1 |
| 111002 Asthma-F | 6.9 | 2.3 |
| 111003 Atopic Asthma-F | 10.9 | 5.1 |
| 111004 Atopic Asthma-F | 23.8 | 19.3 |
| 111005 Atopic Asthma-F | 15.9 | 13.3 |
| 111006 Atopic Asthma-F | 1.9 | 1.1 |
| 111417 Allergy-M | 5.7 | 2.2 |
| 112347 Allergy-M | 0.0 | 0.3 |
| 112349 Normal Lung-F | 0.0 | 0.1 |
| 112357 Normal Lung-F | 62.4 | 50.0 |
| 112354 Normal Lung-M | 23.7 | 24.5 |
| 112374 Crohns-F | 0.8 | 0.0 |
| 112389 Match Control Crohns-F | 2.5 | 2.1 |
| 112375 Crohns-F | 0.0 | 0.3 |
| 112732 Match Control Crohns-F | 1.7 | 0.9 |
| 112725 Crohns-M | 0.0 | 0.0 |
| 112387 Match Control Crohns-M | 2.0 | 0.9 |
| 112378 Crohns-M | 0.0 | 0.0 |
| 112390 Match Control Crohns-M | 8.7 | 6.2 |
| 112726 Crohns-M | 14.9 | 13.2 |
| 112731 Match Control Crohns-M | 4.4 | 10.2 |
| 112380 Ulcer Col-F | 5.4 | 8.8 |
| 112734 Match Control Ulcer Col-F | 4.3 | 4.0 |
| 112384 Ulcer Col-F | 2.3 | 2.4 |
| 112737 Match Control Ulcer Col-F | 6.1 | 4.9 |
| 112386 Ulcer Col-F | 0.0 | 0.0 |
| 112738 Match Control Ulcer Col-F | 40.6 | 28.3 |
| 112381 Ulcer Col-M | 0.0 | 0.0 |
| 112735 Match Control Ulcer Col-M | 0.0 | 0.0 |
| 112382 Ulcer Col-M | 4.5 | 4.5 |
| 112394 Match Control Ulcer Col-M | 0.0 | 0.0 |
| 112383 Ulcer Col-M | 6.9 | 3.4 |
| 112736 Match Control Ulcer Col-M | 1.2 | 0.6 |
| 112423 Psoriasis-F | 4.4 | 1.5 |
| 112427 Match Control Psoriasis-F | 6.1 | 6.3 |
| 112418 Psoriasis-M | 0.8 | 0.3 |
| 112723 Match Control Psoriasis-M | 54.7 | 51.1 |
| 112419 Psoriasis-M | 1.5 | 1.2 |
| 112424 Match Control Psoriasis-M | 2.0 | 0.8 |
| 112420 Psoriasis-M | 6.4 | 6.9 |
| 112425 Match Control Psoriasis-M | 9.9 | 4.5 |
| 104689 (MF) OA Bone-Backus | 0.0 | 0.0 |
| 104690 (MF) Adj “Normal” Bone-Backus | 2.2 | 0.0 |
| 104691 (MF) OA Synovium-Backus | 1.7 | 0.3 |
| 104692 (BA) OA Cartilage-Backus | 23.3 | 11.3 |
| 104694 (BA) OA Bone-Backus | 0.0 | 0.0 |
| 104695 (BA) Adj “Normal” Bone-Backus | 3.1 | 0.6 |
| 104696 (BA) OA Synovium-Backus | 0.0 | 0.4 |
| 104700 (SS) OA Bone-Backus | 1.0 | 0.4 |
| 104701 (SS) Adj “Normal” Bone-Backus | 0.0 | 0.3 |
| 104702 (SS) OA Synovium-Backus | 0.9 | 0.3 |
| 117093 OA Cartilage Rep7 | 1.6 | 1.9 |
| 112672 OA Bone5 | 0.0 | 1.6 |
| 112673 OA Synovium5 | 0.0 | 1.0 |
| 112674 OA Synovial Fluid cells5 | 1.8 | 0.0 |
| 117100 OA Cartilage Rep14 | 1.7 | 2.0 |
| 112756 OA Bone9 | 2.6 | 0.0 |
| 112757 OA Synovium9 | 17.7 | 11.3 |
| 112758 OA Synovial Fluid Cells9 | 1.3 | 0.3 |
| 117125 RA Cartilage Rep2 | 3.2 | 1.2 |
| 113492 Bone2 RA | 68.8 | 84.7 |
| 113493 Synovium2 RA | 22.5 | 25.2 |
| 113494 Syn Fluid Cells RA | 47.6 | 50.7 |
| 113499 Cartilage4 RA | 48.6 | 74.2 |
| 113500 Bone4 RA | 54.0 | 89.5 |
| 113501 Synovium4 RA | 30.8 | 59.9 |
| 113502 Syn Fluid Cells4 RA | 20.4 | 34.6 |
| 113495 Cartilage3 RA | 54.7 | 63.3 |
| 113496 Bone3 RA | 77.4 | 68.8 |
| 113497 Synovium3 RA | 43.2 | 36.3 |
| 113498 Syn Fluid Cells3 RA | 100.0 | 100.0 |
| 117106 Normal Cartilage Rep20 | 0.9 | 2.2 |
| 113663 Bone3 Normal | 0.0 | 0.3 |
| 113664 Synovium3 Normal | 0.0 | 0.0 |
| 113665 Syn Fluid Cells3 Normal | 0.0 | 0.0 |
| 117107 Normal Cartilage Rep22 | 1.4 | 0.1 |
| 113667 Bone4 Normal | 0.0 | 1.8 |
| 113668 Synovium4 Normal | 1.4 | 0.5 |
| 113669 Syn Fluid Cells4 Normal | 4.5 | 2.9 |

Column A - Rel. Ex. (%) Ag4038, Run 257315330
Column B - Rel. Exp. (%) Ag4044, Run 257315364

[0436] TABLE AE
General screening panel v1.7

| Tissue Name | A |
|---|---|
| Adipose | 0.8 |
| HUVEC | 1.7 |
| Melanoma* Hs688(A).T | 0.0 |
| Melanoma* Hs688(B).T | 2.8 |
| Melanoma (met) SK-MEL-5 | 0.8 |
| Testis | 1.2 |
| Prostate ca. (bone met) PC-3 | 0.0 |
| Prostate ca. DU145 | 19.9 |
| Prostate pool | 0.8 |
| Uterus pool | 1.1 |
| Ovarian ca. OVCAR-3 | 13.5 |
| Ovarian ca. (ascites) SK-OV-3 | 2.9 |
| Ovarian ca. OVCAR-4 | 15.5 |
| Ovarian ca. OVCAR-5 | 19.1 |
| Ovarian ca. IGROV-1 | 88.9 |
| Ovarian ca. OVCAR-8 | 61.6 |
| Ovary | 4.5 |
| Breast ca. MCF-7 | |
| Breast ca. MDA-MB-231 | 0.6 |
| Breast ca. BT 549 | 1.6 |
| Breast ca. T47D | 17.4 |
| 113452 mammary gland | 0.9 |
| Trachea | 1.4 |
| Lung | 32.3 |
| Fetal Lung | 68.3 |
| Lung ca. NCI-N417 | 0.0 |
| Lung ca. LX-1 | 41.5 |
| Lung ca. NCI-H146 | 0.1 |
| Lung ca. SHP-77 | 0.3 |
| Lung ca. NCI-H23 | 33.7 |
| Lung ca. NCI-H460 | 0.1 |
| Lung ca. HOP-62 | 1.3 |
| Lung ca. NCI-H522 | 0.9 |
| Lung ca. DMS-114 | 1.4 |
| Liver | 28.7 |
| Fetal Liver | 31.2 |
| Kidney pool | 34.4 |
| Fetal Kidney | 2.3 |
| Renal ca. 786-0 | 13.6 |
| Renal ca. A498 | 20.4 |
| Renal ca. ACHN | 23.0 |
| Renal ca. UO-31 | 0.7 |
| Renal ca. TK-10 | 29.3 |
| Bladder | 1.6 |
| Gastric ca. (liver met.) NCI-N87 | 1.8 |
| Stomach | 0.0 |
| Colon ca. SW-948 | 19.6 |
| Colon ca. SW480 | 0.3 |
| Colon ca. (SW480 met) SW620 | 100.0 |
| Colon ca. HT29 | 9.2 |
| Colon ca. HCT-116 | 73.7 |
| Colon cancer tissue | 0.3 |
| Colon ca. SW1116 | 8.4 |
| Colon ca. Colo-205 | 42.9 |
| Colon ca. SW-48 | 59.0 |
| Colon | 21.9 |
| Small Intestine | 0.8 |
| Fetal Heart | 0.2 |
| Heart | 0.0 |
| Lymph Node Pool | 1.5 |
| Lymph Node pool 2 | 5.2 |
| Fetal Skeletal Muscle | 2.7 |
| Skeletal Muscle pool | 0.0 |
| Skeletal Muscle | 1.3 |
| Spleen | 4.6 |
| Thymus | 0.0 |
| CNS cancer (glio/astro) SF-268 | 0.0 |
| CNS cancer (glio/astro) T98G | 0.0 |
| CNS cancer (neuro; met) SK-N-AS | 0.0 |
| CNS cancer (astro) SF-539 | 0.1 |
| CNS cancer (astro) SNB-75 | 0.3 |
| CNS cancer (glio) SNB-19 | 1.1 |
| CNS cancer (glio) SF-295 | 0.3 |
| Brain (Amygdala) | 0.4 |
| Brain (Cerebellum) | 0.7 |
| Brain (Fetal) | 4.7 |
| Brain (Hippocampus) | 0.4 |
| Cerebral Cortex pool | 0.4 |
| Brain (Substantia nigra) | 0.0 |
| Brain (Thalamus) | 0.0 |
| Brain (Whole) | 0.0 |
| Spinal Cord | 0.9 |
| Adrenal Gland | 15.9 |
| Pituitary Gland | 0.6 |
| Salivary Gland | 0.5 |
| Thyroid | 1.7 |
| Pancreatic ca. PANC-1 | 0.0 |
| Pancreas pool | 6.0 |

Column A - Rel. Ex. (%) Ag7932, Run 318010162

[0437] TABLE AF
PGI1.0

| Tissue Name | A |
|---|---|
| 162191 Normal Lung 1 (IBS) | 2.9 |
| 160468 MD lung | 7.3 |
| 156629 MD Lung 13 | 2.8 |
| 162570 Normal Lung 4 (Aastrand) | 5.4 |
| 162571 Normal Lung 3 (Aastrand) | 1.7 |
| 162187 Fibrosis Lung 2 (Genomic Collaborative) | 92.7 |
| 151281 Fibrosis lung 11 (Ardais) | 62.0 |
| 162186 Fibrosis Lung 1 (Genomic Collaborative) | 100.0 |
| 162190 Asthma Lung 4 (Genomic Collaborative) | 45.1 |
| 160467 Asthma Lung 13 (MD) | 5.9 |
| 137027 Emphysema Lung 1 (Ardais) | 8.4 |
| 137028 Emphysema Lung 2 (Ardais) | 18.2 |
| 137040 Emphysema Lung 3 (Ardais) | 24.5 |
| 137041 Emphysema Lung 4 (Ardais) | 9.8 |
| 137043 Emphysema Lung 5 (Ardais) | 16.2 |
| 142817 Emphysema Lung 6 (Ardais) | 22.2 |
| 142818 Emphysema Lung 7 (Ardais) | 2.3 |
| 142819 Emphysema Lung 8 (Ardais) | 17.2 |
| 142820 Emphysema Lung 9 (Ardais) | 4.1 |
| 142821 Emphysema Lung 10 (Ardais) | 16.2 |
| 162185 Emphysema Lung 12 (Ardais) | 42.9 |
| 162184 Emphysema Lung 13 (Ardais) | 13.6 |
| 162183 Emphysema Lung 14 (Ardais) | 38.7 |
| 162188 Emphysema Lung 15 (Genomic Collaborative) | 93.3 |
| 162177 NAT UC Colon 1 (Ardais) | 9.7 |
| 162176 UC Colon 1 (Ardais) | 7.0 |
| 162179 NAT UC Colon 2 (Ardais) | 5.0 |
| 162178 UC Colon 2 (Ardais) | 2.4 |
| 162181 NAT UC Colon 3 (Ardais) | 15.3 |
| 162180 UC Colon 3 (Ardais) | 4.0 |
| 162182 NAT UC Colon 4 (Ardais) | 18.2 |
| 137042 UC Colon 1108 | 1.4 |
| 137029 UC Colon 8215 | 1.6 |
| 137031 UC Colon 8217 | 1.2 |
| 137036 UC Colon 1137 | 3.9 |
| 137038 UC Colon 1491 | 3.0 |
| 137039 UC Colon 1546 | 9.4 |
| 162593 Crohn's 47751 (NDRI) | 0.3 |
| 162594 NAT Crohn's 47751 (NDRI) | 1.3 |

Column A - Rel. Exp. (%) Ag4044, Run 429319809

[0438] TABLE AG
general oncology screening panel v 2.4

| Tissue Name | A | B |
|---|---|---|
| Colon cancer 1 | 35.8 | 19.9 |
| CC Margin (ODO3921) | 9.2 | 3.9 |
| Colon cancer 2 | 9.5 | 6.0 |
| Colon NAT 2 | 9.3 | 2.9 |
| Colon cancer 3 | 62.0 | 40.3 |
| Colon NAT 3 | 9.9 | 4.3 |
| Colon malignant cancer 4 | 25.9 | 13.0 |
| Colon NAT 4 | 3.5 | 2.0 |
| Lung cancer 1 | 0.7 | 0.5 |
| Lung NAT 1 | 2.2 | 0.7 |
| Lung cancer 2 | 100.0 | 100.0 |
| Lung NAT 2 | 1.6 | 3.4 |
| Squamous cell carcinoma 3 | 12.3 | 5.4 |
| Lung NAT 3 | 0.5 | 0.6 |
| Metastatic melanoma 1 | 3.4 | 1.6 |
| Melanoma 2 | 0.1 | 0.1 |
| Melanoma 3 | 0.0 | 0.1 |
| Metastatic melanoma 4 | 23.7 | 11.2 |
| Metastatic melanoma 5 | 17.4 | 9.1 |
| Bladder cancer 1 | 0.0 | 0.0 |
| Bladder NAT 1 | 0.0 | 0.0 |
| Bladder cancer 2 | 1.6 | 0.5 |
| Bladder NAT 2 | 0.0 | 0.0 |
| Bladder NAT 3 | 0.1 | 0.0 |
| Bladder NAT 4 | 0.9 | 1.5 |
| Prostate adenocarcinoma 1 | 4.0 | 3.1 |
| Prostate adenocarcinoma 2 | 0.0 | 0.2 |
| Prostate adenocarcinoma 3 | 0.5 | 0.5 |
| Prostate adenocarcinoma 4 | 25.5 | 18.2 |
| Prostate NAT 5 | 0.0 | 0.1 |
| Prostate adenocarcinoma 6 | 0.0 | 0.2 |
| Prostate adenocarcinoma 7 | 1.2 | 0.3 |
| Prostate adenocarcinoma 8 | 0.0 | 0.0 |
| Prostate adenocarcinoma 9 | 6.3 | 5.6 |
| Prostate NAT 10 | 0.0 | 0.0 |
| Kidney cancer 1 | 7.5 | 5.0 |
| Kidney NAT 1 | 6.5 | 6.0 |
| Kidney cancer 2 | 69.7 | 58.6 |
| Kidney NAT 2 | 7.7 | 12.9 |
| Kidney cancer 3 | 12.8 | 16.3 |
| Kidney NAT 3 | 2.4 | 6.0 |
| Kidney cancer 4 | 61.6 | 21.6 |
| Kidney NAT 4 | 29.1 | 13.2 |

Column A - Rel. Exp. (%) Ag408, Run 268362923
Column B - Rel. Exp. (%) Ag4044, Run 268362934

[0439] Al_comprehensive panel_v1.0 Summary: Ag4044/Ag4038 Moderate levels of expression of this gene were detected in all the samples derived from rheumatoid arthritis bone and adjacent bone, cartilage, synovium and synovial fluid samples, while no expression could be seen in normal control samples. Therefore, modulation of this gene, encoded protein and/or use of antibodies or small molecule targeting this gene or gene product is useful in the treatment of inflammatory and autoimmune diseases such as rheumatoid arthritis.

[0440] General_screening_panel_v1.7 Summary: Ag7932 and Ag7932 are specific to the deletion splice variant of FGFR4, CG101729-02. The expression of this soluble FGFR4 variant was elevated in a number of ovarian cancer cell lines. The gene's expression is useful in differentiating ovarian cancer from normal ovarian tissue. Therapeutic modulation of this soluble orm of FGFR4, expressed protein and/or use of antibodies or small molecule drugs targeting the ene or gene product would be useful in the treatment of ovarian cancer.

[0441] PGI1.0 Summary: Ag4044 Elevated expression levels of this gene were detected in diseased lung tissues with Fibrosis, Asthma, and Emphysema as compared with normal lung tissues. Therapeutic modulation of this gene, expressed protein and/or use of antibodies or small molecule drugs targeting the gene or gene product would be useful in the treatment of Fibrosis, Asthma, and Emphysema.

[0442] general oncology screening panel_V_{—}2.4 Summary: Ag4044/Ag4038 Elevated expression levels of this gene were detected in colon cancer samples as compared to normal adjacent tissues. The gene's expression is useful in differentiating colon cancer tissue from normal colon tissue. Therapeutic modulation of this gene, expressed protein and/or use of antibodies or small molecule drugs targeting the gene or gene product are useful in the treatment of colon cancer.

[0443] B. NOV3, CG185793-02: MMP15.

[0444] Expression of gene CG185793-02 was assessed using the primer-probe sets Ag3682 and Ag7951, described in Tables BA and BB. Results of the RTQ-PCR runs are shown in Tables BC and BD.

TABLE BA
Probe Name Ag3682

| | | | | |
|---|---|---|---|---|
| | | | Start | SEQ |
| Primers | Sequences | Length | Position | ID No |

| | | | | |
|---|---|---|---|---|
| Forward | 5′-gctactggctctttcgag | 21 | 990 | 152 |
| | aag-3′ | | | |
| Probe | TET-5′-ctacccacagccgc | 25 | 1027 | 153 |
| | tgaccagctat-3′-TAMRA | | | |
| Reverse | 5′-cgtgtcaatgcggtcata | 19 | 1066 | 154 |
| | g-3′ | | | |

[0445] TABLE BB
Probe Name Ag7951

| | | | Start | SEQ |
|---|---|---|---|---|
| Primers | Sequences | Length | Position | ID No |
| Forward | 5′-gtggaaggacgttgacaa | 21 | 393 | 155 |
| | ctt-3′ | | | |
| Probe | TET-5′-atctccgtggcatc | 26 | 431 | 156 |
| | cagcagctctac-3′-TAMRA | | | |
| Reverse | 5′-tggactctgcatttccaa | 21 | 459 | 157 |
| | gtt-3′ | | | |

[0446] TABLE BC
General screening panel v1.7

| Tissue Name | A |
|---|---|
| Adipose | 1.5 |
| HUVEC | 0.0 |
| Melanoma* Hs688(A).T | 0.0 |
| Melanoma* Hs688(B).T | 0.2 |
| Melanoma (met) SK-MEL-5 | 0.2 |
| Testis | 2.5 |
| Prostate ca. (bone met) PC-3 | 0.0 |
| Prostate ca. DU145 | 1.2 |
| Prostate pool | 0.2 |
| Uterus pool | 0.1 |
| Ovarian ca. OVCAR-3 | 0.8 |
| Ovarian ca. (ascites) SK-OV-3 | 0.0 |
| Ovarian ca. OVCAR-4 | 0.0 |
| Ovarian ca. OVCAR-5 | 6.0 |
| Ovarian ca. IGROV-1 | 0.3 |
| Ovarian ca. OVCAR-8 | 0.0 |
| Ovary | 1.2 |
| Breast ca. MCF-7 | 1.8 |
| Breast ca. MDA-MB-231 | 0.0 |
| Breast ca. BT 549 | 0.0 |
| Breast ca. T47D | 0.0 |
| 113452 mammary gland | |
| Trachea | 2.7 |
| Lung | 9.8 |
| Fetal Lung | 2.7 |
| Lung ca. NCI-N417 | 0.0 |
| Lung ca. LX-1 | 0.2 |
| Lung ca. NCI-H146 | 0.0 |
| Lung ca. SHP-77 | 1.7 |
| Lung ca. NCI-H23 | 0.0 |
| Lung ca. NCI-H460 | 0.0 |
| Lung ca. HOP-62 | 0.0 |
| Lung ca. NCI-H522 | 1.6 |
| Lung ca. DMS-114 | 0.0 |
| Liver | 10.0 |
| Fetal Liver | 1.7 |
| Kidney pool | 11.4 |
| Fetal Kidney | 1.2 |
| Renal ca. 786-0 | 0.0 |
| Renal ca. A498 | 0.0 |
| Renal ca. ACHN | 0.0 |
| Renal ca. UO-31 | 3.5 |
| Renal ca. TK-10 | 0.9 |
| Bladder | 0.3 |
| Gastric ca. (liver met.) NCI-N87 | 0.0 |
| Stomach | 0.0 |
| Colon ca. SW-948 | 0.0 |
| Colon ca. SW480 | 0.0 |
| Colon ca. (SW480 met) SW620 | 0.0 |
| Colon ca. HT29 | 2.2 |
| Colon ca. HCT-116 | 9.7 |
| Colon cancer tissue | 0.0 |
| Colon ca. SW1116 | 0.2 |
| Colon ca. Colo-205 | 0.0 |
| Colon ca. SW-48 | 1.1 |
| Colon | 13.4 |
| Small Intestine | 0.0 |
| Fetal Heart | 13.9 |
| Heart | 0.6 |
| Lymph Node Pool | 0.3 |
| Lymph Node pool 2 | 0.4 |
| Fetal Skeletal Muscle | 0.0 |
| Skeletal Muscle pool | 0.7 |
| Skeletal Muscle | 15.5 |
| Spleen | 7.5 |
| Thymus | 0.0 |
| CNS cancer (glio/astro) SF-268 | 0.0 |
| CNS cancer (glio/astro) T98G | 0.0 |
| CNS cancer (neuro; met) SK-N-AS | 0.0 |
| CNS cancer (astro) SF-539 | 0.0 |
| CNS cancer (astro) SNB-75 | 0.0 |
| CNS cancer (glio) SNB-19 | 0.0 |
| CNS cancer (glio) SF-295 | 0.0 |
| Brain (Amygdala) | 0.0 |
| Brain (Cerebellum) | 1.9 |
| Brain (Fetal) | 10.4 |
| Brain (Hippocampus) | 0.0 |
| Cerebral Cortex pool | 0.0 |
| Brain (Substantia nigra) | 0.0 |
| Brain (Thalamus) | 0.0 |
| Brain (Whole) | 1.7 |
| Spinal Cord | 0.1 |
| Adrenal Gland | 0.1 |
| Pituitary Gland | 1.5 |
| Salivary Gland | 0.0 |
| Thyroid | 100.0 |
| Pancreatic ca. PANC-1 | 0.0 |
| Pancreas pool | 0.9 |

Column A - Rel. Ex. (%) Ag7951, Run 319261585

[0447] TABLE BD
general oncology screening panel v 2.4

| Tissue Name | A |
|---|---|
| Colon cancer 1 | 33.9 |
| CC Margin (ODO3921) | 17.3 |
| Colon cancer 2 | 23.0 |
| Colon NAT 2 | 26.6 |
| Colon cancer 3 | 43.2 |
| Colon NAT 3 | 19.6 |
| Colon malignant cancer 4 | 100.0 |
| Colon NAT 4 | 9.8 |
| Lung cancer 1 | 7.6 |
| Lung NAT 1 | 1.2 |
| Lung cancer 2 | 27.9 |
| Lung NAT 2 | 1.7 |
| Squamous cell carcinoma 3 | 17.1 |
| Lung NAT 3 | 0.6 |
| Metastatic melanoma 1 | 4.4 |
| Melanoma 2 | 0.9 |
| Melanoma 3 | 0.9 |
| Metastatic melanoma 4 | 9.5 |
| Metastatic melanoma 5 | 11.0 |
| Bladder cancer 1 | 0.6 |
| Bladder NAT 1 | 0.0 |
| Bladder cancer 2 | 1.3 |
| Bladder NAT 2 | 0.1 |
| Bladder NAT 3 | 0.1 |
| Bladder NAT 4 | 2.0 |
| Prostate adenocarcinoma 1 | 2.1 |
| Prostate adenocarcinoma 2 | 0.5 |
| Prostate adenocarcinoma 3 | 1.4 |
| Prostate adenocarcinoma 4 | 16.7 |
| Prostate NAT 5 | 1.0 |
| Prostate adenocarcinoma 6 | 1.7 |
| Prostate adenocarcinoma 7 | 2.0 |
| Prostate adenocarcinoma 8 | 1.1 |
| Prostate adenocarcinoma 9 | 3.3 |
| Prostate NAT 10 | 0.6 |
| Kidney cancer 1 | 12.6 |
| Kidney NAT 1 | 4.6 |
| Kidney cancer 2 | 10.2 |
| Kidney NAT 2 | 7.1 |
| Kidney cancer 3 | 4.7 |
| Kidney NAT 3 | 3.8 |
| Kidney cancer 4 | 9.3 |
| Kidney NAT 4 | 7.1 |

Column A - Rel. Exp. (%) Ag362, Run 267742159

[0448] General_screening_panel_v1.7 Summary: Ag7951 Highest gene expression was detected in Thyroid (CT=9.5). Moderate gene expression was seen in spleen, brain, kidney, skeletal muscle, liver, colon, and lung. This ubiquitous pattern of expression indicates that this gene product is involved in homeostatic processes for these and other cell types and tissues. This gene was expressed at much higher level in fetal (CT=32.3) when compared to adult heart (CT=35). This observation indicates that the protein product may enhance heart growth or development in the fetus and thus act in a regenerative capacity in the adult. This gene's expression is useful in distinguishing fetal heart tissue from adult heart tissue. Therapeutic modulation of this gene, expressed protein and/or use of antibodies or small molecule drugs targeting the gene or gene product are useful in treatment of heart related diseases.

[0449] general oncology screening panel_V_{—}2.4 Summary: Ag3682 Highest gene expression was detected in a malignant colon cancer sample (CT=27.96). Expression of this gene was upregulated in all lung cancer and prostate cancer samples when compared to the matched control margins. Moderate expression of this gene was seen in all melanoma samples. Therefore, expression of this gene is useful to differentiate lung, prostate and melanoma cancerous tissues from corresponding normal tissue. Therapeutic modulation of this gene, expressed protein and/or use of antibodies or small molecule drugs targeting the gene or gene product would be useful in the treatment of melanoma, prostate, and lung cancers.

[0450] C. NOV6 CG54470: FGF19-X.

[0451] Expression of gene CG54470 was assessed using the primer-probe sets Ag78b and Ag78, described in Tables CA and CB. Results of the RTQ-PCR runs are shown in Tables CC and CD.

TABLE CA
Probe Name Ag78b

| | | | Start | SEQ |
|---|---|---|---|---|
| Primers | Sequences | Length | Position | ID No |
| Forward | 5′-gaccagccagcacagaaa | 20 | 93 | 158 |
| | cc-3′ | | | |
| Probe | TET-5′-agtgctcgaacccg | 23 | 60 | 159 |
| | gtctcgtcc-3′-TAMRA | | | |
| Reverse | 5′-ggacccgagccattgat | 18 | 37 | 160 |
| | g-3′ | | | |

[0452] TABLE CB
Probe Name Ag78

| | | | Start | SEQ |
|---|---|---|---|---|
| Primers | Sequences | Length | Position | ID No |
| Forward | 5′-gaccagccagcacagaaa | 20 | 93 | 161 |
| | cc-3′ | | | |
| Probe | TET-5′-tcctgagtgctcga | 24 | 64 | 162 |
| | acccggtctc-3′-TAMRA | | | |
| Reverse | 5′-ggacccgagccattgat | 18 | 37 | 163 |
| | g-3′ | | | |

[0453] TABLE CC
Panel 1.3D

| Tissue Name | A |
|---|---|
| Liver adenocarcinoma | 0.0 |
| Pancreas | 0.0 |
| Pancreatic ca. CAPAN 2 | 0.4 |
| Adrenal gland | 0.0 |
| Thyroid | 0.0 |
| Salivary gland | 0.0 |
| Pituitary gland | 0.0 |
| Brain (fetal) | 0.0 |
| Brain (whole) | 0.0 |
| Brain (amygdala) | 0.0 |
| Brain (cerebellum) | 0.2 |
| Brain (hippocampus) | 0.2 |
| Brain (substantia nigra) | 0.0 |
| Brain (thalamus) | 0.0 |
| Cerebral Cortex | 0.0 |
| Spinal cord | 0.0 |
| glio/astro U87-MG | 0.0 |
| glio/astro U-118-MG | 0.0 |
| astrocytoma SW1783 | 0.0 |
| neuro*; met SK-N-AS | 0.9 |
| astrocytoma SF-539 | 0.0 |
| astrocytoma SNB-75 | 0.0 |
| glioma SNB-19 | 0.0 |
| glioma U251 | 0.0 |
| glioma SF-295 | 8.7 |
| Heart (Fetal) | 2.2 |
| Heart | 0.0 |
| Skeletal muscle (Fetal) | 3.4 |
| Skeletal muscle | 2.4 |
| Bone marrow | 0.5 |
| Thymus | 0.2 |
| Spleen | 0.0 |
| Lymph node | 0.0 |
| Colorectal | 0.4 |
| Stomach | 0.0 |
| Small intestine | 0.0 |
| Colon ca. SW480 | 1.0 |
| Colon ca.* SW620 (SW480 met) | 3.6 |
| Colon ca. HT29 | 1.4 |
| Colon ca. HCT-116 | 0.0 |
| Colon ca. CaCo-2 | 0.0 |
| CC Well to Mod Diff (ODO3866) | 0.0 |
| Colon ca. HCC-2998 | 0.0 |
| Gastric ca. (liver met) NCI-N87 | 0.0 |
| Bladder | 0.2 |
| Trachea | 1.5 |
| Kidney | 0.0 |
| Kidney (fetal) | 0.0 |
| Renal ca. 786-0 | 0.0 |
| Renal ca. A498 | 0.0 |
| Renal ca. RXF 393 | 0.0 |
| Renal ca. ACHN | 0.1 |
| Renal ca. UO-31 | 0.0 |
| Renal ca. TK-10 | 0.3 |
| Liver | 17.2 |
| Liver (fetal) | 19.2 |
| Liver ca. (hepatoblast) HepG2 | 0.0 |
| Lung | 0.6 |
| Lung (fetal) | 0.0 |
| Lung ca. (small cell) LX-1 | 5.6 |
| Lung ca. (small cell) NCI-H69 | 100.0 |
| Lung ca. (s. cell var.) SHP-77 | 7.9 |
| Lung ca. (large cell)NCI-H460 | 1.8 |
| Lung ca. (non-sm. cell) A549 | 0.4 |
| Lung ca. (non-s. cell) NCI-H23 | 1.9 |
| Lung ca. (non-s. cell) HOP-62 | 0.0 |
| Lung ca. (non-s. cl) NCI-H522 | 3.0 |
| Lung ca. (squam.) SW 900 | 0.0 |
| Lung ca. (squam.) NCI-H596 | 1.6 |
| Mammary gland | 0.0 |
| Breast ca.* (pl. ef) MCF-7 | 0.3 |
| Breast ca.* (pl. ef) MDA-MB-231 | 0.9 |
| Breast ca.* (pl. ef) T47D | 0.0 |
| Breast ca. BT-549 | 0.7 |
| Breast ca. MDA-N | 0.0 |
| Ovary | 0.3 |
| Ovarian ca. OVCAR-3 | 0.0 |
| Ovarian ca. OVCAR-4 | 0.0 |
| Ovarian ca. OVCAR-5 | 0.7 |
| Ovarian ca. OVCAR-8 | 0.4 |
| Ovarian ca. IGROV-1 | 2.2 |
| Ovarian ca. (ascites) SK-OV-3 | 0.9 |
| Uterus | 0.0 |
| Placenta | 0.7 |
| Prostate | 0.0 |
| Prostate ca.* (bone met) PC-3 | 0.0 |
| Testis | 0.3 |
| Melanoma Hs688(A).T | 0.0 |
| Melanoma* (met) Hs688(B).T | 0.0 |
| Melanoma UACC-62 | 0.3 |
| Melanoma M14 | 0.0 |
| Melanoma LOX IMVI | 0.0 |
| Melanoma* (met) SK-MEL-5 | 0.0 |
| Adipose | 0.0 |

Column A - Rel. Exp. (%) Ag78b, Run 152827429

[0454] TABLE CD
Panel 2D

| Tissue Name | A | B |
|---|---|---|
| Normal Colon | 0.6 | 0.0 |
| CC Well to Mod Diff (ODO3866) | 0.0 | 0.6 |
| CC Margin (ODO3866) | 0.0 | 0.1 |
| CC Gr. 2 rectosigmoid (ODO3868) | 0.0 | 0.2 |
| CC Margin (ODO3868) | 0.0 | 0.0 |
| CC Mod Diff (ODO3920) | 0.0 | 0.0 |
| CC Margin (ODO3920) | 0.0 | 0.0 |
| CC Gr. 2 ascend colon (ODO3921) | 0.0 | 0.0 |
| CC Margin (ODO3921) | 0.0 | 0.0 |
| CC from Partial Hepatectomy | 5.3 | 12.5 |
| (ODO4309) Mets | | |
| Liver Margin (ODO4309) | 100.0 | 100.0 |
| Colon mets to lung (OD04451-01) | 0.0 | 0.0 |
| Lung Margin (OD04451-02) | 0.0 | 0.0 |
| Normal Prostate 6546-1 | 0.0 | 0.0 |
| Prostate Cancer (OD04410) | 0.0 | 0.0 |
| Prostate Margin (OD04410) | 0.0 | 0.2 |
| Prostate Cancer (OD04720-01) | 0.0 | 0.1 |
| Prostate Margin (OD04720-02) | 0.3 | 0.0 |
| Normal Lung | 0.1 | 0.2 |
| Lung Met to Muscle (ODO4286) | 0.0 | 0.0 |
| Muscle Margin (ODO4286) | 0.0 | 0.0 |
| Lung Malignant Cancer (OD03126) | 0.0 | 0.0 |
| Lung Margin (OD03126) | 0.0 | 0.0 |
| Lung Cancer (OD04404) | 0.0 | 0.0 |
| Lung Margin (OD04404) | 0.0 | 0.0 |
| Lung Cancer (OD04565) | 0.0 | 0.0 |
| Lung Margin (OD04565) | 0.0 | 0.0 |
| Lung Cancer (OD04237-01) | 0.0 | 0.4 |
| Lung Margin (OD04237-02) | 0.0 | 0.0 |
| Ocular Mel Met to Liver (ODO4310) | 0.0 | 0.6 |
| Liver Margin (ODO4310) | 44.8 | 60.7 |
| Melanoma Metastasis | 0.0 | 0.0 |
| Lung Margin (OD04321) | 0.0 | 0.0 |
| Normal Kidney | 0.0 | 0.4 |
| Kidney Ca, Nuclear grade 2 (OD04338) | 0.0 | 0.0 |
| Kidney Margin (OD04338) | 0.0 | 0.0 |
| Kidney Ca Nuclear grade 1/2 (OD04339) | 0.0 | 0.0 |
| Kidney Margin (OD04339) | 0.0 | 0.0 |
| Kidney Ca, Clear cell type (OD04340) | 0.0 | 0.0 |
| Kidney Margin (OD04340) | 0.6 | 0.0 |
| Kidney Ca, Nuclear grade 3 (OD04348) | 0.0 | 0.0 |
| Kidney Margin (OD04348) | 0.0 | 0.0 |
| Kidney Cancer (OD04622-01) | 0.0 | 0.0 |
| Kidney Margin (OD04622-03) | 0.0 | 0.0 |
| Kidney Cancer (OD04450-01) | 0.0 | 0.0 |
| Kidney Margin (OD04450-03) | 0.0 | 0.0 |
| Kidney Cancer 8120607 | 0.0 | 0.8 |
| Kidney Margin 8120608 | 0.0 | 0.0 |
| Kidney Cancer 8120613 | 0.0 | 0.0 |
| Kidney Margin 8120614 | 0.0 | 0.0 |
| Kidney Cancer 9010320 | 0.2 | 0.0 |
| Kidney Margin 9010321 | 0.0 | 0.4 |
| Normal Uterus | 0.0 | 0.0 |
| Uterine Cancer 064011 | 0.0 | 0.0 |
| Normal Thyroid | 0.0 | 0.0 |
| Thyroid Cancer | 0.0 | 0.4 |
| Thyroid Cancer A302152 | 0.3 | 0.4 |
| Thyroid Margin A302153 | 0.0 | 0.0 |
| Normal Breast | 0.0 | 0.0 |
| Breast Cancer | 0.0 | 0.0 |
| Breast Cancer (OD04590-01) | 0.0 | 0.0 |
| Breast Cancer Mets (OD04590-03) | 0.0 | 0.0 |
| Breast Cancer Metastasis | 0.0 | 0.0 |
| Breast Cancer | 0.0 | 0.0 |
| Breast Cancer | 0.0 | 0.1 |
| Breast Cancer 9100266 | 0.0 | 0.0 |
| Breast Margin 9100265 | 0.0 | 0.0 |
| Breast Cancer A209073 | 0.0 | 0.0 |
| Breast Margin A209073 | 0.0 | 0.0 |
| Normal Liver | 1.2 | 1.0 |
| Liver Cancer | 13.9 | 18.0 |
| Liver Cancer 1025 | 8.1 | 6.4 |
| Liver Cancer 1026 | 13.2 | 13.8 |
| Liver Cancer 6004-T | 33.9 | 16.6 |
| Liver Tissue 6004-N | 0.6 | 0.7 |
| Liver Cancer 6005-T | 34.2 | 28.1 |
| Liver Tissue 6005-N | 15.8 | 14.1 |
| Normal Bladder | 0.3 | 0.0 |
| Bladder Cancer | 0.0 | 0.0 |
| Bladder Cancer | 0.9 | 1.7 |
| Bladder Cancer (OD04718-01) | 0.0 | 0.3 |
| Bladder Normal Adjacent (OD04718-03) | 0.5 | 0.3 |
| Normal Ovary | 0.0 | 0.0 |
| Ovarian Cancer | 0.0 | 0.4 |
| Ovarian Cancer (OD04768-07) | 5.6 | 7.4 |
| Ovary Margin (OD04768-08) | 0.0 | 0.0 |
| Normal Stomach | 0.0 | 0.0 |
| Gastric Cancer 9060358 | 0.0 | 0.0 |
| Stomach Margin 9060359 | 0.0 | 0.2 |
| Gastric Cancer 9060395 | 0.0 | 0.0 |
| Stomach Margin 9060394 | 0.0 | 0.0 |
| Gastric Cancer 9060397 | 0.0 | 0.0 |
| Stomach Margin 9060396 | 0.0 | 0.0 |
| Gastric Cancer 064005 | 0.0 | 0.0 |

Column A - Rel. Exp. (%) Ag78, Run 158135898
Column B - Rel. Exp. (%) Ag78b, Run 152827454

[0455] Panel 1.3D Summary: Ag78b Moderate gene expression was detected in cancer cell lines derived from lung, while no expression was seen in normal lung tissue. Thus, the gene's expression is useful in differentiating lung cancer from normal lung tissue. Therapeutic modulation of this gene, expressed protein and/or use of antibodies or small molecule drugs targeting the gene or gene product are useful in the treatment of lung cancer.

[0456] Panel 2D Summary: Ag78 Gene expression was highest in a sample derived from normal liver tissue adjacent to a colon cancer metastasis. In addition, there was substantial expression in samples derived from normal liver and liver cancers as well as a sample derived from liver tissue adjacent to an ocular melanoma metastasis. Of particular interest is the difference in expression of this gene between liver cancers and their adjacent normal tissues. There was a 20-fold and 2-fold difference in expression between liver cancer samples when compared to matched margins (6004-T vs 6004-N and 6005-T vs 6005-N, respectively). Gene expression is useful in differentiating liver cancer tissue from normal liver tissue. Therapeutic modulation of this gene, expressed protein and/or use of antibodies or small molecule drugs targeting the gene or gene product are useful in the treatment of liver cancer.

[0457] D. NOV7, CG55051: Alpha-2-macroglobulin like.

[0458] Expression of gene CG55051 was assessed using the primer-probe sets Agl 180 and Ag1312, described in Tables DA and DB. Results of the RTQ-PCR runs are shown in Tables DC, DD, DE and DF.

TABLE DA
Probe Name Ag1180

| | | | Start | SEQ |
|---|---|---|---|---|
| Primers | Sequences | Length | Position | ID No |
| Forward | 5′-cctggaaatagggtacca | 22 | 3027 | 164 |
| | gaag-3′ | | | |
| Probe | TET-5′-acacagcaatggct | 26 | 3063 | 165 |
| | catacagtgcct-3′-TAMRA | | | |
| Reverse | 5′-tcagccatgtgtttccat | 20 | 3105 | 166 |
| | tt-3′ | | | |

[0459] TABLE DB
Probe Name Ag1312

| | | | Start | SEQ |
|---|---|---|---|---|
| Primers | Sequences | Length | Position | ID No |
| Forward | 5′-cctggaaatagggtacca | 22 | 3027 | 167 |
| | gaag-3′ | | | |
| Probe | TET-5′-acacagcaatggct | 26 | 3063 | 168 |
| | catacagtgcct-3′-TAMRA | | | |
| Reverse | 5′-tcagccatgtgtttccat | 20 | 3105 | 169 |
| | tt-3′ | | | |

[0460] TABLE DC
AI comprehensive panel v1.0

| Tissue Name | A |
|---|---|
| 110967 COPD-F | 0.0 |
| 110980 COPD-F | 0.0 |
| 110968 COPD-M | 0.0 |
| 110977 COPD-M | 0.0 |
| 110989 Emphysema-F | 0.0 |
| 110992 Emphysema-F | 0.0 |
| 110993 Emphysema-F | 0.0 |
| 110994 Emphysema-F | 0.0 |
| 110995 Emphysema-F | 0.0 |
| 110996 Emphysema-F | 0.0 |
| 110997 Asthma-M | 0.0 |
| 111001 Asthma-F | 0.0 |
| 111002 Asthma-F | 0.0 |
| 111003 Atopic Asthma-F | 0.1 |
| 111004 Atopic Asthma-F | 0.0 |
| 111005 Atopic Asthma-F | 0.0 |
| 111006 Atopic Asthma-F | 0.0 |
| 111417 Allergy-M | 0.0 |
| 112347 Allergy-M | 0.0 |
| 112349 Normal Lung-F | 0.0 |
| 112357 Normal Lung-F | 0.1 |
| 112354 Normal Lung-M | 0.0 |
| 112374 Crohns-F | 0.0 |
| 112389 Match Control Crohns-F | 49.7 |
| 112375 Crohns-F | 0.1 |
| 112732 Match Control Crohns-F | 53.6 |
| 112725 Crohns-M | 0.0 |
| 112387 Match Control Crohns-M | 0.1 |
| 112378 Crohns-M | 0.0 |
| 112390 Match Control Crohns-M | 0.1 |
| 112726 Crohns-M | 0.1 |
| 112731 Match Control Crohns-M | 0.1 |
| 112380 Ulcer Col-F | 0.0 |
| 112734 Match Control Ulcer Col-F | 100.0 |
| 112384 Ulcer Col-F | 0.2 |
| 112737 Match Control Ulcer Col-F | 0.0 |
| 112386 Ulcer Col-F | 0.0 |
| 112738 Match Control Ulcer Col-F | 0.0 |
| 112381 Ulcer Col-M | 0.0 |
| 112735 Match Control Ulcer Col-M | 0.0 |
| 112382 Ulcer Col-M | 61.6 |
| 112394 Match Control Ulcer Col-M | 0.1 |
| 112383 Ulcer Col-M | 0.1 |
| 112736 Match Control Ulcer Col-M | 46.0 |
| 112423 Psoriasis-F | 0.0 |
| 112427 Match Control Psoriasis-F | 0.5 |
| 112418 Psoriasis-M | 0.1 |
| 112723 Match Control Psoriasis-M | 0.0 |
| 112419 Psoriasis-M | 0.2 |
| 112424 Match Control Psoriasis-M | 0.0 |
| 112420 Psoriasis-M | 0.2 |
| 112425 Match Control Psoriasis-M | 0.1 |
| 104689 (MF) OA Bone-Backus | 0.1 |
| 104690 (MF) Adj “Normal” Bone-Backus | 0.0 |
| 104691 (MF) OA Synovium-Backus | 0.0 |
| 104692 (BA) OA Cartilage-Backus | 0.0 |
| 104694 (BA) OA Bone-Backus | 0.0 |
| 104695 (BA) Adj “Normal” Bone-Backus | 0.0 |
| 104696 (BA) OA Synovium-Backus | 0.0 |
| 104700 (SS) OA Bone-Backus | 0.0 |
| 104701 (SS) Adj “Normal” Bone-Backus | 0.1 |
| 104702 (SS) OA Synovium-Backus | 0.1 |
| 117093 OA Cartilage Rep7 | 0.0 |
| 112672 OA Bone5 | 0.6 |
| 112673 OA Synovium5 | 0.7 |
| 112674 OA Synovial Fluid cells5 | 0.4 |
| 117100 OA Cartilage Rep14 | 0.0 |
| 112756 OA Bone9 | 0.0 |
| 112757 OA Synovium9 | 0.0 |
| 112758 OA Synovial Fluid Cells9 | 0.0 |
| 117125 RA Cartilage Rep2 | 0.0 |
| 113492 Bone2 RA | 0.0 |
| 113493 Synovium2 RA | 0.0 |
| 113494 Syn Fluid Cells RA | 0.0 |
| 113499 Cartilage4 RA | 0.0 |
| 113500 Bone4 RA | 0.0 |
| 113501 Synovium4 RA | 0.0 |
| 113502 Syn Fluid Cells4 RA | 0.0 |
| 113495 Cartilage3 RA | 0.0 |
| 113496 Bone3 RA | 0.0 |
| 113497 Synovium3 RA | 0.0 |
| 113498 Syn Fluid Cells3 RA | 0.0 |
| 117106 Normal Cartilage Rep20 | 0.0 |
| 113663 Bone3 Normal | 0.0 |
| 113664 Synovium3 Normal | 0.0 |
| 113665 Syn Fluid Cells3 Normal | 0.0 |
| 117107 Normal Cartilage Rep22 | 0.0 |
| 113667 Bone4 Normal | 0.1 |
| 113668 Synovium4 Normal | 0.0 |
| 113669 Syn Fluid Cells4 Normal | 0.0 |

Column A - Rel. Ex. (%) Ag1180, Run 228061003

[0461] TABLE DD
Panel 1.3D

| Tissue Name | A |
|---|---|
| Liver adenocarcinoma | 0.0 |
| Pancreas | 0.0 |
| Pancreatic ca. CAPAN 2 | 11.3 |
| Adrenal gland | 0.0 |
| Thyroid | 1.6 |
| Salivary gland | 7.5 |
| Pituitary gland | 0.8 |
| Brain (fetal) | 4.5 |
| Brain (whole) | 8.9 |
| Brain (amygdala) | 22.7 |
| Brain (cerebellum) | 8.0 |
| Brain (hippocampus) | 4.9 |
| Brain (substantia nigra) | 1.9 |
| Brain (thalamus) | 6.7 |
| Cerebral Cortex | 6.8 |
| Spinal cord | 47.6 |
| glio/astro U87-MG | 0.0 |
| glio/astro U-118-MG | 0.0 |
| astrocytoma SW1783 | 0.0 |
| neuro*; met SK-N-AS | 0.0 |
| astrocytoma SF-539 | 0.0 |
| astrocytoma SNB-75 | 0.0 |
| glioma SNB-19 | 0.0 |
| glioma U251 | 0.0 |
| glioma SF-295 | 0.0 |
| Heart (Fetal) | 0.0 |
| Heart | 0.0 |
| Skeletal muscle (Fetal) | 0.0 |
| Skeletal muscle | 0.9 |
| Bone marrow | 0.0 |
| Thymus | 14.1 |
| Spleen | 1.4 |
| Lymph node | 0.0 |
| Colorectal | 0.0 |
| Stomach | 17.8 |
| Small intestine | 0.0 |
| Colon ca. SW480 | 0.0 |
| Colon ca.* SW620 (SW480 met) | 0.0 |
| Colon ca. HT29 | 0.0 |
| Colon ca. HCT-116 | 0.0 |
| Colon ca. CaCo-2 | 0.0 |
| CC Well to Mod Diff (ODO3866) | 0.0 |
| Colon ca. HCC-2998 | 0.0 |
| Gastric ca. (liver met) NCI-N87 | 100.0 |
| Bladder | 0.0 |
| Trachea | 7.5 |
| Kidney | 0.4 |
| Kidney (fetal) | 0.0 |
| Renal ca. 786-0 | 0.0 |
| Renal ca. A498 | 0.0 |
| Renal ca. RXF 393 | 0.0 |
| Renal ca. ACHN | 0.0 |
| Renal ca. UO-31 | 0.0 |
| Renal ca. TK-10 | 0.0 |
| Liver | 0.0 |
| Liver (fetal) | 0.0 |
| Liver ca. (hepatoblast) HepG2 | 0.0 |
| Lung | 0.0 |
| Lung (fetal) | 0.9 |
| Lung ca. (small cell) LX-1 | 0.0 |
| Lung ca. (small cell) NCI-H69 | 0.0 |
| Lung ca. (s. cell var.) SHP-77 | 0.0 |
| Lung ca. (large cell)NCI-H460 | 0.0 |
| Lung ca. (non-sm. cell) A549 | 0.0 |
| Lung ca. (non-s. cell) NCI-H23 | 0.0 |
| Lung ca. (non-s. cell) HOP-62 | 0.0 |
| Lung ca. (non-s. cl) NCI-H522 | 0.0 |
| Lung ca. (squam.) SW 900 | 0.0 |
| Lung ca. (squam.) NCI-H596 | 0.0 |
| Mammary gland | 3.0 |
| Breast ca.* (pl. ef) MCF-7 | 0.9 |
| Breast ca.* (pl. ef) MDA-MB-231 | 0.0 |
| Breast ca.* (pl. ef) T47D | 0.0 |
| Breast ca. BT-549 | 0.0 |
| Breast ca. MDA-N | 0.0 |
| Ovary | 2.5 |
| Ovarian ca. OVCAR-3 | 0.2 |
| Ovarian ca. OVCAR-4 | 0.0 |
| Ovarian ca. OVCAR-5 | 0.0 |
| Ovarian ca. OVCAR-8 | 0.0 |
| Ovarian ca. IGROV-1 | 0.0 |
| Ovarian ca. (ascites) SK-OV-3 | 0.3 |
| Uterus | 0.0 |
| Placenta | 11.3 |
| Prostate | 0.0 |
| Prostate ca.* (bone met) PC-3 | 0.0 |
| Testis | 17.1 |
| Melanoma Hs688(A).T | 0.0 |
| Melanoma* (met) Hs688(B).T | 0.0 |
| Melanoma UACC-62 | 0.9 |
| Melanoma M14 | 0.0 |
| Melanoma LOX IMVI | 0.0 |
| Melanoma* (met) SK-MEL-5 | 0.0 |
| Adipose | 0.0 |

Column A - Rel. Exp. (%) Ag1180, Run 165920069

[0462] TABLE DE
Panel 2D

| Tissue Name | A |
|---|---|
| Normal Colon | 0.1 |
| CC Well to Mod Diff (ODO3866) | 0.1 |
| CC Margin (ODO3866) | 0.0 |
| CC Gr. 2 rectosigmoid (ODO3868) | 0.0 |
| CC Margin (ODO3868) | 0.0 |
| CC Mod Diff (ODO3920) | 0.1 |
| CC Margin (ODO3920) | 0.1 |
| CC Gr. 2 ascend colon (ODO3921) | 0.0 |
| CC Margin (ODO3921) | 0.0 |
| CC from Partial Hepatectomy (ODO4309) Mets | 0.0 |
| Liver Margin (ODO4309) | 0.0 |
| Colon mets to lung (OD04451-01) | 0.0 |
| Lung Margin (OD04451-02) | 0.0 |
| Normal Prostate 6546-1 | 3.3 |
| Prostate Cancer (OD04410) | 0.0 |
| Prostate Margin (OD04410) | 0.6 |
| Prostate Cancer (OD04720-01) | 0.5 |
| Prostate Margin (OD04720-02) | 0.8 |
| Normal Lung | 0.1 |
| Lung Met to Muscle (ODO4286) | 0.0 |
| Muscle Margin (ODO4286) | 0.0 |
| Lung Malignant Cancer (OD03126) | 0.0 |
| Lung Margin (OD03126) | 0.0 |
| Lung Cancer (OD04404) | 18.4 |
| Lung Margin (OD04404) | 0.0 |
| Lung Cancer (OD04565) | 0.1 |
| Lung Margin (OD04565) | 0.0 |
| Lung Cancer (OD04237-01) | 0.0 |
| Lung Margin (OD04237-02) | 0.0 |
| Ocular Mel Met to Liver (ODO4310) | 0.1 |
| Liver Margin (ODO4310) | 0.0 |
| Melanoma Metastasis | 0.0 |
| Lung Margin (OD04321) | 0.0 |
| Normal Kidney | 0.1 |
| Kidney Ca, Nuclear grade 2 (OD04338) | 0.0 |
| Kidney Margin (OD04338) | 0.0 |
| Kidney Ca Nuclear grade 1/2 (OD04339) | 0.0 |
| Kidney Margin (OD04339) | 0.0 |
| Kidney Ca, Clear cell type (OD04340) | 0.0 |
| Kidney Margin (OD04340) | 0.0 |
| Kidney Ca, Nuclear grade 3 (OD04348) | 0.0 |
| Kidney Margin (OD04348) | 0.0 |
| Kidney Cancer (OD04622-01) | 0.0 |
| Kidney Margin (OD04622-03) | 0.1 |
| Kidney Cancer (OD04450-01) | 0.0 |
| Kidney Margin (OD04450-03) | 0.0 |
| Kidney Cancer 8120607 | 0.0 |
| Kidney Margin 8120608 | 0.0 |
| Kidney Cancer 8120613 | 0.0 |
| Kidney Margin 8120614 | 0.0 |
| Kidney Cancer 9010320 | 0.0 |
| Kidney Margin 9010321 | 0.0 |
| Normal Uterus | 0.0 |
| Uterine Cancer 064011 | 0.4 |
| Normal Thyroid | 0.4 |
| Thyroid Cancer | 0.0 |
| Thyroid Cancer A302152 | 0.0 |
| Thyroid Margin A302153 | 0.0 |
| Normal Breast | 0.1 |
| Breast Cancer | 0.0 |
| Breast Cancer (OD04590-01) | 0.0 |
| Breast Cancer Mets (OD04590-03) | 0.0 |
| Breast Cancer Metastasis | 0.0 |
| Breast Cancer | 1.2 |
| Breast Cancer | 0.0 |
| Breast Cancer 9100266 | 0.0 |
| Breast Margin 9100265 | 0.0 |
| Breast Cancer A209073 | 0.2 |
| Breast Margin A209073 | 0.1 |
| Normal Liver | 0.0 |
| Liver Cancer | 0.0 |
| Liver Cancer 1025 | 0.0 |
| Liver Cancer 1026 | 0.0 |
| Liver Cancer 6004-T | 0.0 |
| Liver Tissue 6004-N | 0.0 |
| Liver Cancer 6005-T | 0.0 |
| Liver Tissue 6005-N | 0.0 |
| Normal Bladder | 0.0 |
| Bladder Cancer | 0.0 |
| Bladder Cancer | 12.9 |
| Bladder Cancer (OD04718-01) | 0.6 |
| Bladder Normal Adjacent (OD04718-03) | 0.0 |
| Normal Ovary | 0.1 |
| Ovarian Cancer | 0.8 |
| Ovarian Cancer (OD04768-07) | 100.0 |
| Ovary Margin (OD04768-08) | 0.1 |
| Normal Stomach | 0.0 |
| Gastric Cancer 9060358 | 0.0 |
| Stomach Margin 9060359 | 0.0 |
| Gastric Cancer 9060395 | 0.2 |
| Stomach Margin 9060394 | 0.0 |
| Gastric Cancer 9060397 | 0.1 |
| Stomach Margin 9060396 | 0.0 |
| Gastric Cancer 064005 | 0.1 |

Column A - Rel. Exp. (%) Ag1180, Run 162599404

[0463] TABLE DEF
Panel 4D

| Tissue Name | A | B |
|---|---|---|
| Secondary Th1 act | 0.0 | 0.0 |
| Secondary Th2 act | 0.0 | 0.0 |
| Secondary Tr1 act | 0.0 | 0.0 |
| Secondary Th1 rest | 0.0 | 0.0 |
| Secondary Th2 rest | 0.0 | 0.0 |
| Secondary Tr1 rest | 0.0 | 0.0 |
| Primary Th1 act | 0.0 | 0.0 |
| Primary Th2 act | 0.1 | 0.1 |
| Primary Tr1 act | 0.0 | 0.0 |
| Primary Th1 rest | 0.0 | 0.0 |
| Primary Th2 rest | 0.0 | 0.0 |
| Primary Tr1 rest | 0.0 | 0.0 |
| CD45RA CD4 lymphocyte act | 0.0 | 0.0 |
| CD45RO CD4 lymphocyte act | 0.0 | 0.0 |
| CD8 lymphocyte act | 0.0 | 0.0 |
| Secondary CD8 lymphocyte rest | 0.0 | 0.0 |
| Secondary CD8 lymphocyte act | 0.0 | 0.1 |
| CD4 lymphocyte none | 0.0 | 0.0 |
| 2ry Th1/Th2/Tr1 anti-CD95 CH11 | 0.0 | 0.0 |
| LAK cells rest | 0.0 | 0.0 |
| LAK cells IL-2 | 0.0 | 0.0 |
| LAK cells IL-2 + IL-12 | 0.0 | 0.0 |
| LAK cells IL-2 + IFN gamma | 0.0 | 0.0 |
| LAK cells IL-2 + IL-18 | 0.0 | 0.0 |
| LAK cells PMA/ionomycin | 0.0 | 0.0 |
| NK Cells IL-2 rest | 0.0 | 0.0 |
| Two Way MLR 3 day | 0.0 | 0.0 |
| Two Way MLR 5 day | 0.0 | 0.0 |
| Two Way MLR 7 day | 0.0 | 0.0 |
| PBMC rest | 0.0 | 0.0 |
| PBMC PWM | 0.0 | 0.0 |
| PBMC PHA-L | 0.2 | 0.0 |
| Ramos (B cell) none | 0.0 | 0.0 |
| Ramos (B cell) ionomycin | 0.0 | 0.0 |
| B lymphocytes PWM | 0.0 | 0.0 |
| B lymphocytes CD40L and IL-4 | 0.0 | 0.0 |
| EOL-1 dbcAMP | 0.0 | 0.0 |
| EOL-1 dbcAMP PMA/ionomycin | 0.0 | 0.0 |
| Dendritic cells none | 0.0 | 0.0 |
| Dendritic cells LPS | 0.0 | 0.0 |
| Dendritic cells anti-CD40 | 0.1 | 0.0 |
| Monocytes rest | 0.0 | 0.0 |
| Monocytes LPS | 0.1 | 0.1 |
| Macrophages rest | 0.0 | 0.0 |
| Macrophages LPS | 0.0 | 0.0 |
| HUVEC none | 0.0 | 0.0 |
| HUVEC starved | 0.0 | 0.0 |
| HUVEC IL-1beta | 0.0 | 0.0 |
| HUVEC IFN gamma | 0.0 | 0.0 |
| HUVEC TNF alpha + IFN gamma | 0.0 | 0.0 |
| HUVEC TNF alpha + IL4 | 0.0 | 0.0 |
| HUVEC IL-11 | 0.0 | 0.0 |
| Lung Microvascular EC none | 0.0 | 0.0 |
| Lung Microvascular EC TNFalpha + IL-1beta | 0.0 | 0.0 |
| Microvascular Dermal EC none | 0.0 | 0.0 |
| Microsvasular Dermal EC TNFalpha + IL-1beta | 0.0 | 0.0 |
| Bronchial epithelium TNFalpha + IL1beta | 5.3 | 5.7 |
| Small airway epithelium none | 28.7 | 38.7 |
| Small airway epithelium TNFalpha + IL-1beta | 100.0 | 100.0 |
| Coronery artery SMC rest | 0.0 | 0.0 |
| Coronery artery SMC TNFalpha + IL-1beta | 0.0 | 0.0 |
| Astrocytes rest | 0.0 | 0.0 |
| Astrocytes TNFalpha + IL-1beta | 0.0 | 0.1 |
| KU-812 (Basophil) rest | 0.1 | 0.1 |
| KU-812 (Basophil) PMA/ionomycin | 0.1 | 0.0 |
| CCD1106 (Keratinocytes) none | 1.7 | 1.7 |
| 93580 CCD1106 (Keratinocytes) TNFa and IFNg | 15.3 | 14.8 |
| Liver cirrhosis | 0.0 | 0.0 |
| Lupus kidney | 0.0 | 0.0 |
| NCI-H292 none | 0.3 | 0.1 |
| NCI-H292 IL-4 | 0.3 | 0.1 |
| NCI-H292 IL-9 | 0.0 | 0.1 |
| NCI-H292 IL-13 | 0.1 | 0.1 |
| NCI-H292 IFN gamma | 0.0 | 0.0 |
| HPAEC none | 0.0 | 0.0 |
| HPAEC TNF alpha + IL-1 beta | 0.0 | 0.0 |
| Lung fibroblast none | 0.0 | 0.0 |
| Lung fibroblast TNF alpha + IL-1 beta | 0.0 | 0.0 |
| Lung fibroblast IL-4 | 0.0 | 0.0 |
| Lung fibroblast IL-9 | 0.0 | 0.0 |
| Lung fibroblast IL-13 | 0.0 | 0.0 |
| Lung fibroblast IFN gamma | 0.0 | 0.0 |
| Dermal fibroblast CCD1070 rest | 0.0 | 0.0 |
| Dermal fibroblast CCD1070 TNF alpha | 0.0 | 0.0 |
| Dermal fibroblast CCD1070 IL-1 beta | 0.0 | 0.0 |
| Dermal fibroblast IFN gamma | 0.0 | 0.0 |
| Dermal fibroblast IL-4 | 0.0 | 0.0 |
| IBD Colitis 2 | 0.0 | 0.0 |
| IBD Crohn's | 0.0 | 0.0 |
| Colon | 0.0 | 0.0 |
| Lung | 0.0 | 0.0 |
| Thymus | 0.1 | 0.2 |
| Kidney | 1.8 | 3.0 |

Column A - Rel. Exp. (%) Ag1180, Run 139410602
Column B - Rel. Exp. (%) Ag1312, Run 138968169

[0464] Al_comprehensive panel_v1.0 Summary: Ag1180 High gene expression was detected in Crohns tissues from female patients, while no expression was detected in Crohns samples from male patients. The gene's expression is useful in differentiating Crohns disease colon tissue from normal colon tissue in female patients. Therapeutic modulation of this gene, expressed protein and/or use of antibodies or small molecule drugs targeting the gene or gene product are useful in the treatment of Crohns disease and other inflammatory disorders including psoriasis, allergy, asthma, inflammatory bowel disease, rheumatoid arthritis and osteoarthritis.

[0465] Panel 1.3D Summary: Agl 180 Moderate levels of gene expression were detected in gastric cancer cell lines (CT=30.4) and lower levels in pancreatic cancer cell lines (CT=33.5). Gene expression is useful for differentiating gastric and pancreatic cancerous tissue from normal tissue. Therapeutic modulation of this gene, expressed protein and/or use of antibodies or small molecule drugs targeting the gene or gene product are useful in the treatment of gastric and pancreatic cancers. Low levels of gene expression was detected in brain. Among tissues involved in central nervous system function, this gene is specifically expressed at low to moderate levels in the amygdala, cerebellum, cortex, hippocampus and thalamus, and expressed highly in the spinal cord and cerebral cortex. Alpha-2-macroglobulin has been implicated in Alzheimer's disease, both genetically and biochemically in the clearance of beta amyloid. The high similarity of this gene's protein product to alpha-2-macroglobulin suggests indicates its involvement in Alzheimer's. Therapeutic modulation of this gene, expressed protein and/or use of antibodies or small molecule drugs targeting the gene or gene product are useful in the treatment of Alzheimer's disease. Agents that increase expression, concentration, or activity of this gene will aid in the clearance of A-beta, which is a hallmark of Alzheimer's disease histopathology.

[0466] Panel 2D Summary: Agl 180 Highest gene expression was detected in ovarian cancer tissue (CT=25.67) and it is overexpressed in ovarian cancer samples when compared to the normal margins. There was low but significant expression of this gene in some breast, bladder, and lung cancer samples. Expression of this gene can be used to differentiate ovarian breast, bladder, and lung cancerous tissue from normal specimens. Therapeutic modulation of this gene, expressed protein and/or use of antibodies or small molecule drugs targeting the gene or gene product would be useful in the treatment of bladder, ovarian, breast, and lung cancer.

[0467] Panel 4D Summary: Ag1180/Ag1312 Expression of this gene was detected at moderate levels in small airway epithelium (CT=28) and is slightly upregulated when treated with TNF-alpha+IL-1beta (CT=26-27). This gene encodes a protein that is a macroglobulin-like molecule belonging to a class of proteinase inhibitor that can behave as a potent modulator of the inflammatory reaction and tissue repair mechanism. Therapeutic modulation of this gene, expressed protein and/or use of antibodies or small molecule drugs targeting the gene or gene product are useful in the treatment of asthma and emphysema. Expression of this gene was detected in keratinocytes stimulated with the inflammatory cytokines TNF-alpha+IL-1 beta (CT=29). The gene's expression is useful in differentiating keratinocytes stimulated with the inflammatory cytokines TNF-alpha+IL-1 beta from unstimulated keratinocytes. Therapeutic modulation of this gene, expressed protein and/or use of antibodies or small molecule drugs targeting the gene or gene product would be useful in the treatment of skin related disease such as psoriasis, eczema, and contact dermatitis.

[0468] E. NOV 8, CG55060: SLPI.

[0469] Expression of gene CG55060 was assessed using the primer-probe set Ag588, described in Table EA. Results of the RTQ-PCR runs are shown in Tables EB, EC, ED, EE, EF and EG.

TABLE EA
Probe Name Ag588

| | | | | |
|---|---|---|---|---|
| | | | Start | SEQ |
| Primers | Sequences | Length | Position | ID No |

| | | | | |
|---|---|---|---|---|
| Forward | 5′-tgccttcaccatgaagtc | 20 | 9 | 170 |
| | ca-3′ | | | |
| Probe | TET-5′-cttcctggtgctgc | 23 | 42 | 171 |
| | ttgccctgg-3′-TAMRA | | | |
| Reverse | 5′-agcccaaggtgccagagt | 19 | 66 | 172 |
| | t-3′ | | | |

[0470] TABLE EB
Ardais Kidney 1.0

| Tissue Name | A |
|---|---|
| Kidney cancer(10A8) | 5.5 |
| Kidney NAT(10A9) | 0.2 |
| Kidney cancer(10AA) | 0.0 |
| Kidney NAT(10AB) | 0.2 |
| Kidney cancer(10AC) | 0.3 |
| Kidney NAT(10AD) | 10.2 |
| Kidney cancer(10B6) | 0.1 |
| Kidney NAT(10B7) | 0.4 |
| Kidney cancer(10B8) | 2.2 |
| Kidney NAT(10B9) | 0.4 |
| Kidney cancer(10BC) | 30.6 |
| Kidney NAT(10BD) | 2.1 |
| Kidney cancer(10BE) | 0.0 |
| Kidney NAT(10BF) | 0.1 |
| Kidney cancer(10C2) | 1.1 |
| Kidney NAT(10C3) | 0.5 |
| Kidney cancer(10C4) | 0.9 |
| Kidney NAT(10C5) | 0.2 |
| Kidney cancer(10B4) | 4.1 |
| Kidney cancer(10C8) | 0.0 |
| Kidney cancer(10D0) | 0.0 |
| Kidney cancer(10C0) | 92.7 |
| Kidney cancer(10C6) | 0.5 |
| Kidney cancer(10C9) | 0.1 |
| Kidney cancer(10D1) | 0.0 |
| Kidney cancer(10CA) | 100.0 |
| Kidney cancer(10D2) | 0.0 |
| Kidney cancer(10CB) | 3.0 |
| Kidney cancer(10D4) | 2.9 |
| Kidney cancer(10CD) | 0.1 |
| Kidney cancer(10D5) | 0.0 |
| Kidney cancer(10CE) | 0.0 |
| Kidney cancer(10D6) | 0.2 |
| Kidney cancer(10CF) | 0.0 |
| Kidney cancer(10D8) | 0.5 |
| Kidney cancer(10CC) | 1.0 |
| Kidney cancer(10D3) | 3.3 |
| Kidney NAT(10D9) | 0.6 |
| Kidney NAT(10DB) | 5.6 |
| Kidney NAT(10DC) | 0.1 |
| Kidney NAT(10DD) | 1.1 |
| Kidney NAT(10DE) | 1.7 |
| Kidney NAT(10B1) | 3.5 |
| Kidney NAT(10DA) | 0.1 |

Column A - Rel. Exp. (%) Ag588, Run 369943434

[0471] TABLE EC
CNS neurodegeneration v1.0

| Tissue Name | A |
|---|---|
| AD 1 Hippo | 6.1 |
| AD 2 Hippo | 33.7 |
| AD 3 Hippo | 100.0 |
| AD 4 Hippo | 14.3 |
| AD 5 Hippo | 3.8 |
| AD 6 Hippo | 3.1 |
| Control 2 Hippo | 1.1 |
| Control 4 Hippo | 7.9 |
| Control (Path) 3 Hippo | 26.8 |
| AD 1 Temporal Ctx | 10.6 |
| AD 2 Temporal Ctx | 9.9 |
| AD 3 Temporal Ctx | 15.8 |
| AD 4 Temporal Ctx | 3.6 |
| AD 5 Inf Temporal Ctx | 0.5 |
| AD 5 Sup Temporal Ctx | 4.4 |
| AD 6 Inf Temporal Ctx | 2.8 |
| AD 6 Sup Temporal Ctx | 5.2 |
| Control 1 Temporal Ctx | 16.0 |
| Control 2 Temporal Ctx | 0.4 |
| Control 3 Temporal Ctx | 3.1 |
| Control 3 Temporal Ctx | 2.7 |
| AH3 3975 | 1.3 |
| AH3 3954 | 3.3 |
| AH3 4624 | 6.1 |
| AH3 4640 | 0.9 |
| AD 1 Occipital Ctx | 5.1 |
| AD 2 Occipital Ctx (Missing) | 0.4 |
| AD 3 Occipital Ctx | 14.1 |
| AD 4 Occipital Ctx | 3.4 |
| AD 5 Occipital Ctx | 4.4 |
| AD 5 Occipital Ctx | 4.9 |
| Control 1 Occipital Ctx | 15.2 |
| Control 2 Occipital Ctx | 0.6 |
| Control 3 Occipital Ctx | 1.6 |
| Control 4 Occipital Ctx | 2.0 |
| Control (Path) 1 Occipital Ctx | 0.8 |
| Control (Path) 2 Occipital Ctx | 2.3 |
| Control (Path) 3 Occipital Ctx | 17.0 |
| Control (Path) 4 Occipital Ctx | 1.2 |
| Control 1 Parietal Ctx | 15.4 |
| Control 2 Parietal Ctx | 3.0 |
| Control 3 Parietal Ctx | 2.3 |
| Control (Path) 1 Parietal Ctx | 2.8 |
| Control (Path) 2 Parietal Ctx | 7.1 |
| Control (Path) 3 Parietal Ctx | 10.4 |
| Control (Path) 4 Parietal Ctx | 4.2 |

Column A - Rel. Ep. (%) Ag588, Run 224758452

[0472] TABLE ED
General screening panel v1.5

| Tissue Name | A |
|---|---|
| Adipose | 0.9 |
| Melanoma* Hs688(A).T | 0.0 |
| Melanoma* Hs688(B).T | 0.0 |
| Melanoma* M14 | 0.0 |
| Melanoma* LOXIMVI | 0.0 |
| Melanoma* SK-MEL-5 | 0.0 |
| Squamous cell carcinoma SCC-4 | 2.6 |
| Testis Pool | 0.2 |
| Prostate ca.* (bone met) PC-3 | 0.6 |
| Prostate Pool | 0.1 |
| Placenta | 0.0 |
| Uterus Pool | 0.4 |
| Ovarian ca. OVCAR-3 | 6.5 |
| Ovarian ca. SK-OV-3 | 11.3 |
| Ovarian ca. OVCAR-4 | 6.4 |
| Ovarian ca. OVCAR-5 | 4.4 |
| Ovarian ca. IGROV-1 | 4.5 |
| Ovarian ca. OVCAR-8 | 0.1 |
| Ovary | 0.9 |
| Breast ca. MCF-7 | 0.1 |
| Breast ca. MDA-MB-231 | 0.0 |
| Breast ca. BT 549 | 0.0 |
| Breast ca. T47D | 0.0 |
| Breast ca. MDA-N | 0.0 |
| Breast Pool | 0.4 |
| Trachea | 100.0 |
| Lung | 0.0 |
| Fetal Lung | 3.6 |
| Lung ca. NCI-N417 | 0.0 |
| Lung ca. LX-1 | 1.9 |
| Lung ca. NCI-H146 | 0.0 |
| Lung ca. SHP-77 | 0.0 |
| Lung ca. A549 | 0.4 |
| Lung ca. NCI-H526 | 0.0 |
| Lung ca. NCI-H23 | 0.3 |
| Lung ca. NCI-H460 | 2.2 |
| Lung ca. HOP-62 | 0.3 |
| Lung ca. NCI-H522 | 0.0 |
| Liver | 0.3 |
| Fetal Liver | 0.0 |
| Liver ca. HepG2 | 0.2 |
| Kidney Pool | 0.1 |
| Fetal Kidney | 0.0 |
| Renal ca. 786-0 | 0.0 |
| Renal ca. A498 | 0.5 |
| Renal ca. ACHN | 0.0 |
| Renal ca. UO-31 | 0.3 |
| Renal ca. TK-10 | 0.0 |
| Bladder | 1.0 |
| Gastric ca. (liver met.) NCI-N87 | 6.3 |
| Gastric ca. KATO III | 0.2 |
| Colon ca. SW-948 | 0.7 |
| Colon ca. SW480 | 0.2 |
| Colon ca.* (SW480 met) SW620 | 0.0 |
| Colon ca. HT29 | 0.0 |
| Colon ca. HCT-116 | 0.0 |
| Colon ca. CaCo-2 | 0.2 |
| Colon cancer tissue | 0.8 |
| Colon ca. SW1116 | 0.0 |
| Colon ca. Colo-205 | 0.3 |
| Colon ca. SW-48 | 1.4 |
| Colon Pool | 0.1 |
| Small Intestine Pool | 1.0 |
| Stomach Pool | 0.2 |
| Bone Marrow Pool | 3.3 |
| Fetal Heart | 0.0 |
| Heart Pool | 0.0 |
| Lymph Node Pool | 0.1 |
| Fetal Skeletal Muscle | 0.0 |
| Skeletal Muscle Pool | 0.2 |
| Spleen Pool | 0.0 |
| Thymus Pool | 0.3 |
| CNS cancer (glio/astro) U87-MG | 0.0 |
| CNS cancer (glio/astro) U-118-MG | 0.1 |
| CNS cancer (neuro; met) SK-N-AS | 0.0 |
| CNS cancer (astro) SF-539 | 0.0 |
| CNS cancer (astro) SNB-75 | 2.0 |
| CNS cancer (glio) SNB-19 | 2.8 |
| CNS cancer (glio) SF-295 | 36.6 |
| Brain (Amygdala) Pool | 0.0 |
| Brain (cerebellum) | 0.0 |
| Brain (fetal) | 0.0 |
| Brain (Hippocampus) Pool | 0.0 |
| Cerebral Cortex Pool | 0.0 |
| Brain (Substantia nigra) Pool | 0.0 |
| Brain (Thalamus) Pool | 0.0 |
| Brain (whole) | 0.0 |
| Spinal Cord Pool | 0.3 |
| Adrenal Gland | 0.1 |
| Pituitary gland Pool | 0.7 |
| Salivary Gland | 20.4 |
| Thyroid (female) | 0.1 |
| Pancreatic ca. CAPAN2 | 5.1 |
| Pancreas Pool | 2.4 |

Column A - Rel. Ex. (%) Ag588, Run 248445830

[0473] TABLE EE
Panel 2D

| Tissue Name | A |
|---|---|
| Normal Colon | 4.8 |
| CC Well to Mod Diff (ODO3866) | 1.3 |
| CC Margin (ODO3866) | 0.9 |
| CC Gr. 2 rectosigmoid (ODO3868) | 1.8 |
| CC Margin (ODO3868) | 0.0 |
| CC Mod Diff (ODO3920) | 3.1 |
| CC Margin (ODO3920) | 0.5 |
| CC Gr. 2 ascend colon (ODO3921) | 2.3 |
| CC Margin (ODO3921) | 0.4 |
| CC from Partial Hepatectomy (ODO4309) Mets | 1.8 |
| Liver Margin (ODO4309) | 2.4 |
| Colon mets to lung (OD04451-01) | 5.3 |
| Lung Margin (OD04451-02) | 32.8 |
| Normal Prostate 6546-1 | 5.0 |
| Prostate Cancer (OD04410) | 0.3 |
| Prostate Margin (OD04410) | 0.2 |
| Prostate Cancer (OD04720-01) | 0.7 |
| Prostate Margin (OD04720-02) | 1.8 |
| Normal Lung | 56.3 |
| Lung Met to Muscle (ODO4286) | 0.0 |
| Muscle Margin (ODO4286) | 24.5 |
| Lung Malignant Cancer (OD03126) | 42.0 |
| Lung Margin (OD03126) | 40.3 |
| Lung Cancer (OD04404) | 27.4 |
| Lung Margin (OD04404) | 42.6 |
| Lung Cancer (OD04565) | 13.7 |
| Lung Margin (OD04565) | 18.3 |
| Lung Cancer (OD04237-01) | 6.4 |
| Lung Margin (OD04237-02) | 12.8 |
| Ocular Mel Met to Liver (ODO4310) | 0.0 |
| Liver Margin (ODO4310) | 3.6 |
| Melanoma Metastasis | 0.4 |
| Lung Margin (OD04321) | 77.9 |
| Normal Kidney | 1.6 |
| Kidney Ca, Nuclear grade 2 (OD04338) | 3.3 |
| Kidney Margin (OD04338) | 3.0 |
| Kidney Ca Nuclear grade 1/2 (OD04339) | 6.7 |
| Kidney Margin (OD04339) | 0.7 |
| Kidney Ca, Clear cell type (OD04340) | 0.0 |
| Kidney Margin (OD04340) | 2.5 |
| Kidney Ca, Nuclear grade 3 (OD04348) | 7.1 |
| Kidney Margin (OD04348) | 1.8 |
| Kidney Cancer (OD04622-01) | 0.3 |
| Kidney Margin (OD04622-03) | 2.3 |
| Kidney Cancer (OD04450-01) | 9.2 |
| Kidney Margin (OD04450-03) | 1.5 |
| Kidney Cancer 8120607 | 33.2 |
| Kidney Margin 8120608 | 1.7 |
| Kidney Cancer 8120613 | 0.0 |
| Kidney Margin 8120614 | 0.9 |
| Kidney Cancer 9010320 | 27.4 |
| Kidney Margin 9010321 | 2.4 |
| Normal Uterus | 0.1 |
| Uterine Cancer 064011 | 63.3 |
| Normal Thyroid | 1.7 |
| Thyroid Cancer | 13.8 |
| Thyroid Cancer A302152 | 1.3 |
| Thyroid Margin A302153 | 0.5 |
| Normal Breast | 5.5 |
| Breast Cancer | 0.0 |
| Breast Cancer (OD04590-01) | 0.9 |
| Breast Cancer Mets (OD04590-03) | 0.7 |
| Breast Cancer Metastasis | 0.1 |
| Breast Cancer | 1.2 |
| Breast Cancer | 4.1 |
| Breast Cancer 9100266 | 1.7 |
| Breast Margin 9100265 | 1.6 |
| Breast Cancer A209073 | 12.9 |
| Breast Margin A209073 | 6.1 |
| Normal Liver | 1.0 |
| Liver Cancer | 14.4 |
| Liver Cancer 1025 | 2.5 |
| Liver Cancer 1026 | 4.2 |
| Liver Cancer 6004-T | 5.3 |
| Liver Tissue 6004-N | 0.1 |
| Liver Cancer 6005-T | 5.1 |
| Liver Tissue 6005-N | 1.4 |
| Normal Bladder | 2.7 |
| Bladder Cancer | 2.7 |
| Bladder Cancer | 8.2 |
| Bladder Cancer (OD04718-01) | 2.0 |
| Bladder Normal Adjacent (OD04718-03) | 0.9 |
| Normal Ovary | 0.6 |
| Ovarian Cancer | 100.0 |
| Ovarian Cancer (OD04768-07) | 21.9 |
| Ovary Margin (OD04768-08) | 4.1 |
| Normal Stomach | 2.3 |
| Gastric Cancer 9060358 | 0.5 |
| Stomach Margin 9060359 | 2.6 |
| Gastric Cancer 9060395 | 5.4 |
| Stomach Margin 9060394 | 4.9 |
| Gastric Cancer 9060397 | 14.1 |
| Stomach Margin 9060396 | 5.1 |
| Gastric Cancer 064005 | 0.2 |

Column A - Rel. Exp. (%) Ag588, Run 144773993

[0474] TABLE EF
Panel 4D

| Tissue Name | A |
|---|---|
| Secondary Th1 act | 0.0 |
| Secondary Th2 act | 0.0 |
| Secondary Tr1 act | 0.0 |
| Secondary Th1 rest | 0.0 |
| Secondary Th2 rest | 0.0 |
| Secondary Tr1 rest | 0.0 |
| Primary Th1 act | 0.0 |
| Primary Th2 act | 0.0 |
| Primary Tr1 act | 0.0 |
| Primary Th1 rest | 0.0 |
| Primary Th2 rest | 0.0 |
| Primary Tr1 rest | 0.0 |
| CD45RA CD4 lymphocyte act | 0.0 |
| CD45RO CD4 lymphocyte act | 0.0 |
| CD8 lymphocyte act | 1.4 |
| Secondary CD8 lymphocyte rest | 0.0 |
| Secondary CD8 lymphocyte act | 0.0 |
| CD4 lymphocyte none | 0.0 |
| 2ry Th1/Th2/Tr1 anti-CD95 CH11 | 0.0 |
| LAK cells rest | 0.0 |
| LAK cells IL-2 | 0.0 |
| LAK cells IL-2 + IL-12 | 0.0 |
| LAK cells IL-2 + IFN gamma | 0.0 |
| LAK cells IL-2 + IL-18 | 0.0 |
| LAK cells PMA/ionomycin | 0.0 |
| NK Cells IL-2 rest | 0.0 |
| Two Way MLR 3 day | 0.0 |
| Two Way MLR 5 day | 0.0 |
| Two Way MLR 7 day | 0.0 |
| PBMC rest | 0.0 |
| PBMC PWM | 0.2 |
| PBMC PHA-L | 0.0 |
| Ramos (B cell) none | 0.0 |
| Ramos (B cell) ionomycin | 0.0 |
| B lymphocytes PWM | 0.2 |
| B lymphocytes CD40L and IL-4 | 0.0 |
| EOL-1 dbcAMP | 0.2 |
| EOL-1 dbcAMP PMA/ionomycin | 0.0 |
| Dendritic cells none | 0.0 |
| Dendritic cells LPS | 0.0 |
| Dendritic cells anti-CD40 | 0.0 |
| Monocytes rest | 0.0 |
| Monocytes LPS | 0.1 |
| Macrophages rest | 0.0 |
| Macrophages LPS | 0.0 |
| HUVEC none | 0.0 |
| HUVEC starved | 0.0 |
| HUVEC IL-1beta | 0.0 |
| HUVEC IFN gamma | 0.0 |
| HUVEC TNF alpha + IFN gamma | 0.0 |
| HUVEC TNF alpha + IL4 | 0.0 |
| HUVEC IL-11 | 0.0 |
| Lung Microvascular EC none | 0.0 |
| Lung Microvascular EC TNFalpha + IL-1beta | 0.0 |
| Microvascular Dermal EC none | 0.0 |
| Microsvasular Dermal EC TNFalpha + IL-1beta | 0.0 |
| Bronchial epithelium TNFalpha + IL1beta | 3.7 |
| Small airway epithelium none | 53.6 |
| Small airway epithelium TNFalpha + IL-1beta | 100.0 |
| Coronery artery SMC rest | 0.0 |
| Coronery artery SMC TNFalpha + IL-1beta | 0.0 |
| Astrocytes rest | 0.0 |
| Astrocytes TNFalpha + IL-1beta | 0.9 |
| KU-812 (Basophil) rest | 0.0 |
| KU-812 (Basophil) PMA/ionomycin | 0.0 |
| CCD1106 (Keratinocytes) none | 0.7 |
| CCD1106 (Keratinocytes) TNFalpha + IL-1beta | 0.6 |
| Liver cirrhosis | 1.7 |
| Lupus kidney | 9.9 |
| NCI-H292 none | 49.0 |
| NCI-H292 IL-4 | 61.6 |
| NCI-H292 IL-9 | 83.5 |
| NCI-H292 IL-13 | 37.4 |
| NCI-H292 IFN gamma | 43.2 |
| HPAEC none | 0.0 |
| HPAEC TNF alpha + IL-1 beta | 0.0 |
| Lung fibroblast none | 0.0 |
| Lung fibroblast TNF alpha + IL-1 beta | 0.0 |
| Lung fibroblast IL-4 | 0.0 |
| Lung fibroblast IL-9 | 0.0 |
| Lung fibroblast IL-13 | 0.0 |
| Lung fibroblast IFN gamma | 0.0 |
| Dermal fibroblast CCD1070 rest | 0.0 |
| Dermal fibroblast CCD1070 TNF alpha | 0.0 |
| Dermal fibroblast CCD1070 IL-1 beta | 0.0 |
| Dermal fibroblast IFN gamma | 0.0 |
| Dermal fibroblast IL-4 | 0.0 |
| IBD Colitis 2 | 0.0 |
| IBD Crohn's | 0.1 |
| Colon | 0.7 |
| Lung | 36.3 |
| Thymus | 1.4 |
| Kidney | 3.9 |

Column A - Rel. Exp. (%) Ag588, Run 163588119

[0475] TABLE EG
Panel 5D

| Tissue Name | A |
|---|---|
| 97457 Patient-02go adipose | 100.0 |
| 97476 Patient-07sk skeletal muscle | 7.8 |
| 97477 Patient-07ut uterus | 0.3 |
| 97478 Patient-07pl placenta | 1.8 |
| 97481 Patient-08sk skeletal muscle | 9.0 |
| 97482 Patient-08ut uterus | 0.4 |
| 97483 Patient-08pl placenta | 1.1 |
| 97486 Patient-09sk skeletal muscle | 7.6 |
| 97487 Patient-09ut uterus | 1.5 |
| 97488 Patient-09pl placenta | 0.4 |
| 97492 Patient-10ut uterus | 7.1 |
| 97493 Patient-10pl placenta | 0.3 |
| 97495 Patient-11go adipose | 63.3 |
| 97496 Patient-11sk skeletal muscle | 6.9 |
| 97497 Patient-11ut uterus | 1.0 |
| 97498 Patient-11pl placenta | 0.5 |
| 97500 Patient-12go adipose | 52.5 |
| 97501 Patient-12sk skeletal muscle | 3.1 |
| 97502 Patient-12ut uterus | 0.2 |
| 97503 Patient-12pl placenta | 0.1 |
| 94721 Donor 2 U - A Mesenchymal Stem Cells | 0.0 |
| 94722 Donor 2 U - B Mesenchymal Stem Cells | 0.1 |
| 94723 Donor 2 U - C Mesenchymal Stem Cells | 0.0 |
| 94709 Donor 2 AM - A adipose | 1.8 |
| 94710 Donor 2 AM - B adipose | 1.2 |
| 94711 Donor 2 AM - C adipose | 1.0 |
| 94712 Donor 2 AD - A adipose | 2.6 |
| 94713 Donor 2 AD - B adipose | 3.6 |
| 94714 Donor 2 AD - C adipose | 3.0 |
| 94742 Donor 3 U - A Mesenchymal Stem Cells | 0.0 |
| 94743 Donor 3 U - B Mesenchymal Stem Cells | 0.2 |
| 94730 Donor 3 AM - A adipose | 2.4 |
| 94731 Donor 3 AM - B adipose | 1.0 |
| 94732 Donor 3 AM - C adipose | 1.4 |
| 94733 Donor 3 AD - A adipose | 2.8 |
| 94734 Donor 3 AD - B adipose | 1.1 |
| 94735 Donor 3 AD - C adipose | 2.8 |
| 77138 Liver HepG2untreated | 0.1 |
| 73556 Heart Cardiac stromal cells (primary) | 0.0 |
| 81735 Small Intestine | 58.2 |
| 72409 Kidney Proximal Convoluted Tubule | 13.0 |
| 82685 Small intestine Duodenum | 0.2 |
| 90650 Adrenal Adrenocortical adenoma | 0.1 |
| 72410 Kidney HRCE | 15.4 |
| 72411 Kidney HRE | 3.9 |
| 73139 Uterus Uterine smooth muscle cells | 0.0 |

Column A - Rel. Exp. (%) Ag588, Run 248989995

[0476] Ardais Kidney 1.0 Summary: Ag588 High gene expression was detected in kidney cancer samples. The gene's expression is useful in differentiating kidney cancer tissue from normal kidney tissue. Therapeutic modulation of this gene, expressed protein and/or use of antibodies or small molecule drugs targeting the gene or gene product are useful in the treatment of kidney cancer.

[0477] CNS_neurodegeneration_v1.0 Summary: Ag588 Moderate expression levels of this gene were detected in brain in an independent group of individuals. This gene was slightly upregulated in the temporal cortex of Alzheimer's disease patients. The gene's expression is useful in differentiating temporal cortex tissue of Alzheimer's disease patients from normal temporal cortex tissue. Therapeutic modulation of this gene, expressed protein and/or use of antibodies or small molecule drugs targeting the gene or gene product are useful in the treatment of Alzheimer's disease.

[0478] General_screening_panel_v1.5 Summary: Ag588 Highest expression of this gene was seen in the trachea (CT=18). High levels of expression were also seen in ovarian, pancreatic, brain, colon, gastric, and squamous cell carcinoma cell lines. Therapeutic modulation of this gene, expressed protein and/or use of antibodies or small molecule drugs targeting the gene or gene product are useful in the treatment of ovarian, pancreatic, brain, colon, gastric, and squamous cell cancers.

[0479] Panel 2D Summary: Ag588 Highest expression was detected in an ovarian cancer sample (CTs=22). Gene overexpression was detected ovarian, uterine, thyroid and kidney cancer samples when compared to the expression in normal adjacent tissue. Gene expression is useful for differentiating these cancer samples from other samples on this panel and as a marker of these cancers. This gene encodes secretory leucocyte protease inhibitor (SLPI), a potent inhibitor of granulocyte elastase and cathepsin G, as well as pancreatic enzymes like trypsin, chymotrypsin and pancreatic elastase. SLPI has also been shown to inhibit HIV-1 infections by blocking viral DNA synthesis. Therapeutic modulation of this gene, expressed protein and/or use of antibodies or small molecule drugs targeting the gene or gene product are useful in the treatment of ovarian, uterine, thyroid, and kidney cancers.

[0480] Panel 4D Summary: Ag588 Highest gene expression was detected in TNF-a/IL1-b treated small airway epithelium. High gene expression were also seen in untreated small airway epithelium, normal lung, and a cluster of treated and untreated samples derived from the NCI-H292 cell line, a human airway epithelial cell line that produces mucins. Mucus overproduction is a feature of bronchial asthma and chronic obstructive pulmonary disease samples. The expression of this gene in the mucoepidermoid cell line NCI-H292 and in small airway epithelium indicates that this gene is involved in the proliferation or activation of airway epithelium. Therapeutic modulation of this gene, expressed protein and/or use of antibodies or small molecule drugs targeting the gene or gene product are useful in the treatment of symptoms caused by inflammation in lung epithelia in chronic obstructive pulmonary disease, asthma, allergy, and emphysema.

[0481] Panel 5D Summary: Ag588 Prominent expression of this gene was detected in adipose (CTs=26-27). Therapeutic modulation of this gene, expressed protein and/or use of antibodies or small molecule drugs targeting the gene or gene product are useful in the treatment of obesity and diabetes.

[0482] F. NOV 9, CG56008-01: LIV-1 Protein, Estrogen Regulated.

[0483] Expression of gene CG56008-01 was assessed using the primer-probe set Ag2169, described in Table FA. Results of the RTQ-PCR runs are shown in Tables FB, FC, FD, FE, FF, FG and FH.

TABLE FA
Probe Name Ag2169

| | | | Start | SEQ |
|---|---|---|---|---|
| Primers | Sequences | Length | Position | ID No |
| Forward | 5′-cccgaaaaggctttatgt | 22 | 856 | 173 |
| | attc-3′ | | | |
| Probe | TET-5′-cagaaacacaaatg | 27 | 878 | 174 |
| | aaaatcctcagga-3′- | | | |
| | TAMRA | | | |
| Reverse | 5′-tgtcagtagctttgatgc | 22 | 911 | 175 |
| | attg-3′ | | | |

[0484] TABLE FB
Ardais Panel 1.1

| Tissue Name | A |
|---|---|
| 136803 Lung cancer(368) | 35.4 |
| 136804 Lung cancer(369) | 62.0 |
| 136805 Lung NAT(36A) | 11.9 |
| 136787 lung cancer(356) | 1.6 |
| 136788 lung NAT(357) | 15.4 |
| 136806 Lung cancer(36B) | 19.8 |
| 136807 Lung NAT(36C) | 11.0 |
| 136810 Lung NAT(36F) | 37.1 |
| 136789 lung cancer(358) | 10.4 |
| 136802 Lung cancer(365) | 16.5 |
| 136811 Lung cancer(370) | 81.8 |
| 136791 Lung cancer(35A) | 11.7 |
| 136794 lung NAT(35D) | 15.5 |
| 136815 Lung cancer(374) | 5.4 |
| 136816 Lung NAT(375) | 42.9 |
| 136813 Lung cancer(372) | 100.0 |
| 136814 Lung NAT(373) | 2.9 |
| 136795 Lung cancer(35E) | 35.8 |
| 136797 Lung cancer(360) | 4.5 |
| 136799 Lung cancer(362) | 4.3 |
| 136800 Lung NAT(363) | 6.6 |

Column A - Rel. Exp. (%) Ag2169, Run 306368466

[0485] TABLE FC
Panel 1.3D

| Tissue Name | A | B |
|---|---|---|
| Liver adenocarcinoma | 1.8 | 2.0 |
| Pancreas | 1.0 | 0.4 |
| Pancreatic ca. CAPAN 2 | 1.0 | 1.0 |
| Adrenal gland | 0.8 | 0.6 |
| Thyroid | 2.0 | 0.9 |
| Salivary gland | 1.2 | 0.8 |
| Pituitary gland | 3.1 | 2.2 |
| Brain (fetal) | 2.2 | 1.7 |
| Brain (whole) | 2.6 | 2.1 |
| Brain (amygdala) | 2.0 | 1.1 |
| Brain (cerebellum) | 1.4 | 0.9 |
| Brain (hippocampus) | 6.1 | 4.5 |
| Brain (substantia nigra) | 0.5 | 0.8 |
| Brain (thalamus) | 2.5 | 2.0 |
| Cerebral Cortex | 2.8 | 3.1 |
| Spinal cord | 1.6 | 1.4 |
| glio/astro U87-MG | 1.2 | 0.8 |
| glio/astro U-118-MG | 12.0 | 9.3 |
| astrocytoma SW1783 | 2.8 | 3.0 |
| neuro*; met SK-N-AS | 10.7 | 6.7 |
| astrocytoma SF-539 | 1.7 | 1.5 |
| astrocytoma SNB-75 | 2.8 | 3.8 |
| glioma SNB-19 | 1.0 | 0.9 |
| glioma U251 | 0.8 | 0.8 |
| glioma SF-295 | 3.4 | 3.0 |
| Heart (Fetal) | 0.4 | 0.5 |
| Heart | 0.2 | 0.1 |
| Skeletal muscle (Fetal) | 1.2 | 1.4 |
| Skeletal muscle | 0.2 | 0.2 |
| Bone marrow | 0.4 | 0.2 |
| Thymus | 0.3 | 0.3 |
| Spleen | 1.1 | 0.8 |
| Lymph node | 0.8 | 0.5 |
| Colorectal | 0.3 | 0.2 |
| Stomach | 1.5 | 0.8 |
| Small intestine | 0.9 | 0.5 |
| Colon ca. SW480 | 1.6 | 1.2 |
| Colon ca.* SW620 (SW480 met) | 0.7 | 0.5 |
| Colon ca. HT29 | 0.8 | 0.6 |
| Colon ca. HCT-116 | 4.2 | 3.1 |
| Colon ca. CaCo-2 | 0.9 | 1.1 |
| CC Well to Mod Diff (ODO3866) | 1.3 | 1.2 |
| Colon ca. HCC-2998 | 2.1 | 1.6 |
| Gastric ca. (liver met) NCI-N87 | 2.0 | 1.6 |
| Bladder | 1.0 | 0.6 |
| Trachea | 1.6 | 1.6 |
| Kidney | 0.5 | 0.5 |
| Kidney (fetal) | 1.1 | 0.8 |
| Renal ca. 786-0 | 2.6 | 1.7 |
| Renal ca. A498 | 4.2 | 3.2 |
| Renal ca. RXF 393 | 1.2 | 0.8 |
| Renal ca. ACHN | 2.6 | 2.7 |
| Renal ca. UO-31 | 3.3 | 2.4 |
| Renal ca. TK-10 | 2.0 | 1.5 |
| Liver | 0.1 | 0.1 |
| Liver (fetal) | 0.5 | 0.3 |
| Liver ca. (hepatoblast) HepG2 | 1.5 | 1.3 |
| Lung | 0.8 | 0.6 |
| Lung (fetal) | 1.5 | 1.5 |
| Lung ca. (small cell) LX-1 | 1.0 | 0.7 |
| Lung ca. (small cell) NCI-H69 | 10.0 | 6.3 |
| Lung ca. (s. cell var.) SHP-77 | 3.9 | 4.9 |
| Lung ca. (large cell)NCI-H460 | 1.3 | 1.2 |
| Lung ca. (non-sm. cell) A549 | 0.9 | 0.6 |
| Lung ca. (non-s. cell) NCI-H23 | 5.4 | 0.0 |
| Lung ca. (non-s. cell) HOP-62 | 1.8 | 2.0 |
| Lung ca. (non-s. cl) NCI-H522 | 1.8 | 1.2 |
| Lung ca. (squam.) SW 900 | 1.2 | 0.8 |
| Lung ca. (squam.) NCI-H596 | 3.1 | 3.0 |
| Mammary gland | 11.7 | 10.4 |
| Breast ca.* (pl. ef) MCF-7 | 100.0 | 100.0 |
| Breast ca.* (pl. ef) MDA-MB-231 | 2.5 | 2.1 |
| Breast ca.* (pl. ef) T47D | 5.7 | 3.3 |
| Breast ca. BT-549 | 4.5 | 3.6 |
| Breast ca. MDA-N | 2.6 | 2.8 |
| Ovary | 2.0 | 1.3 |
| Ovarian ca. OVCAR-3 | 2.2 | 2.0 |
| Ovarian ca. OVCAR-4 | 0.3 | 0.2 |
| Ovarian ca. OVCAR-5 | 0.6 | 0.5 |
| Ovarian ca. OVCAR-8 | 1.6 | 0.9 |
| Ovarian ca. IGROV-1 | 0.8 | 0.5 |
| Ovarian ca. (ascites) SK-OV-3 | 4.0 | 3.2 |
| Uterus | 1.1 | 0.8 |
| Placenta | 3.4 | 2.1 |
| Prostate | 5.5 | 4.6 |
| Prostate ca.* (bone met) PC-3 | 2.0 | 1.3 |
| Testis | 1.9 | 1.6 |
| Melanoma Hs688(A).T | 4.8 | 4.8 |
| Melanoma* (met) Hs688(B).T | 6.2 | 5.2 |
| Melanoma UACC-62 | 0.3 | 0.3 |
| Melanoma M14 | 2.8 | 2.6 |
| Melanoma LOX IMVI | 6.6 | 0.4 |
| Melanoma* (met) SK-MEL-5 | 7.1 | 5.1 |
| Adipose | 1.2 | 0.8 |

Column A - Rel. Exp. (%) Ag2169, Run 149923246
Column B - Rel. Exp. (%) Ag2169, Run 151268473

[0486] TABLE FD
Panel 2.2

| Tissue Name | A |
|---|---|
| Normal Colon | 1.6 |
| Colon cancer (OD06064) | 4.8 |
| Colon Margin (OD06064) | 0.4 |
| Colon cancer (OD06159) | 0.2 |
| Colon Margin (OD06159) | 0.3 |
| Colon cancer (OD06297-04) | 0.4 |
| Colon Margin (OD06297-05) | 1.2 |
| CC Gr. 2 ascend colon (ODO3921) | 0.5 |
| CC Margin (ODO3921) | 0.4 |
| Colon cancer metastasis (OD06104) | 0.4 |
| Lung Margin (OD06104) | 0.5 |
| Colon mets to lung (OD04451-01) | 0.7 |
| Lung Margin (OD04451-02) | 1.1 |
| Normal Prostate | 4.5 |
| Prostate Cancer (OD04410) | 3.4 |
| Prostate Margin (OD04410) | 2.3 |
| Normal Ovary | 0.6 |
| Ovarian cancer (OD06283-03) | 0.4 |
| Ovarian Margin (OD06283-07) | 0.3 |
| Ovarian Cancer | 0.7 |
| Ovarian cancer (OD06145) | 0.7 |
| Ovarian Margin (OD06145) | 1.8 |
| Ovarian cancer (OD06455-03) | 1.2 |
| Ovarian Margin (OD06455-07) | 0.5 |
| Normal Lung | 0.6 |
| Invasive poor diff. lung adeno (ODO4945-01 | 1.1 |
| Lung Margin (ODO4945-03) | 0.5 |
| Lung Malignant Cancer (OD03126) | 0.9 |
| Lung Margin (OD03126) | 0.4 |
| Lung Cancer (OD05014A) | 0.7 |
| Lung Margin (OD05014B) | 1.4 |
| Lung cancer (OD06081) | 0.2 |
| Lung Margin (OD06081) | 0.2 |
| Lung Cancer (OD04237-01) | 0.9 |
| Lung Margin (OD04237-02) | 1.6 |
| Ocular Mel Met to Liver (ODO4310) | 3.5 |
| Liver Margin (ODO4310) | 0.4 |
| Melanoma Metastasis | 2.0 |
| Lung Margin (OD04321) | 1.2 |
| Normal Kidney | 0.6 |
| Kidney Ca, Nuclear grade 2 (OD04338) | 3.9 |
| Kidney Margin (OD04338) | 1.3 |
| Kidney Ca Nuclear grade 1/2 (OD04339) | 1.2 |
| Kidney Margin (OD04339) | 0.8 |
| Kidney Ca, Clear cell type (OD04340) | 0.8 |
| Kidney Margin (OD04340) | 1.4 |
| Kidney Ca, Nuclear grade 3 (OD04348) | 0.9 |
| Kidney Margin (OD04348) | 5.3 |
| Kidney malignant cancer (OD06204B) | 1.9 |
| Kidney normal adjacent tissue (OD06204E) | 1.2 |
| Kidney Cancer (OD04450-01) | 2.4 |
| Kidney Margin (OD04450-03) | 1.9 |
| Kidney Cancer 8120613 | 0.1 |
| Kidney Margin 8120614 | 0.3 |
| Kidney Cancer 9010320 | 0.5 |
| Kidney Margin 9010321 | 0.3 |
| Kidney Cancer 8120607 | 0.8 |
| Kidney Margin 8120608 | 0.2 |
| Normal Uterus | 1.4 |
| Uterine Cancer 064011 | 1.1 |
| Normal Thyroid | 0.2 |
| Thyroid Cancer | 0.6 |
| Thyroid Cancer A302152 | 1.6 |
| Thyroid Margin A302153 | 0.5 |
| Normal Breast | 7.6 |
| Breast Cancer | 7.6 |
| Breast Cancer | 0.0 |
| Breast Cancer (OD04590-01) | 30.6 |
| Breast Cancer Mets (OD04590-03) | 34.4 |
| Breast Cancer Metastasis | 100.0 |
| Breast Cancer | 2.3 |
| Breast Cancer 9100266 | 25.2 |
| Breast Margin 9100265 | 3.2 |
| Breast Cancer A209073 | 1.1 |
| Breast Margin A209073 | 5.1 |
| Breast cancer (OD06083) | 8.1 |
| Breast cancer node metastasis (OD06083) | 1.2 |
| Normal Liver | 0.5 |
| Liver Cancer 1026 | 0.1 |
| Liver Cancer 1025 | 0.8 |
| Liver Cancer 6004-T | 0.7 |
| Liver Tissue 6004-N | 0.2 |
| Liver Cancer 6005-T | 0.4 |
| Liver Tissue 6005-N | 0.4 |
| Liver Cancer | 0.7 |
| Normal Bladder | 0.7 |
| Bladder Cancer | 0.4 |
| Bladder Cancer | 1.5 |
| Normal Stomach | 1.3 |
| Gastric Cancer 9060397 | 0.2 |
| Stomach Margin 9060396 | 0.5 |
| Gastric Cancer 9060395 | 0.4 |
| Stomach Margin 9060394 | 1.1 |
| Gastric Cancer 064005 | 0.4 |

Column A - Rel. Exp. (%) Ag2169, Run 176282877

[0487] TABLE FE
Panel 2D

| Tissue Name | A |
|---|---|
| Normal Colon | 3.2 |
| CC Well to Mod Diff (ODO3866) | 0.6 |
| CC Margin (ODO3866) | 0.2 |
| CC Gr. 2 rectosigmoid (ODO3868) | 0.1 |
| CC Margin (ODO3868) | 0.2 |
| CC Mod Diff (ODO3920) | 0.2 |
| CC Margin (ODO3920) | 0.3 |
| CC Gr. 2 ascend colon (ODO3921) | 1.0 |
| CC Margin (ODO3921) | 0.3 |
| CC from Partial Hepatectomy (ODO4309) Mets | 1.6 |
| Liver Margin (ODO4309) | 0.5 |
| Colon mets to lung (OD04451-01) | 0.2 |
| Lung Margin (OD04451-02) | 0.4 |
| Normal Prostate 6546-1 | 7.7 |
| Prostate Cancer (OD04410) | 15.1 |
| Prostate Margin (OD04410) | 7.4 |
| Prostate Cancer (OD04720-01) | 3.4 |
| Prostate Margin (OD04720-02) | 6.7 |
| Normal Lung | 1.4 |
| Lung Met to Muscle (ODO4286) | 1.4 |
| Muscle Margin (ODO4286) | 0.7 |
| Lung Malignant Cancer (OD03126) | 1.7 |
| Lung Margin (OD03126) | 1.1 |
| Lung Cancer (OD04404) | 2.0 |
| Lung Margin (OD04404) | 1.0 |
| Lung Cancer (OD04565) | 1.0 |
| Lung Margin (OD04565) | 0.5 |
| Lung Cancer (OD04237-01) | 3.1 |
| Lung Margin (OD04237-02) | 0.9 |
| Ocular Mel Met to Liver (ODO4310) | 3.7 |
| Liver Margin (ODO4310) | 0.2 |
| Melanoma Metastasis | 3.5 |
| Lung Margin (OD04321) | 0.9 |
| Normal Kidney | 2.5 |
| Kidney Ca, Nuclear grade 2 (OD04338) | 2.8 |
| Kidney Margin (OD04338) | 1.8 |
| Kidney Ca Nuclear grade 1/2 (OD04339) | 0.7 |
| Kidney Margin (OD04339) | 1.4 |
| Kidney Ca, Clear cell type (OD04340) | 2.5 |
| Kidney Margin (OD04340) | 1.8 |
| Kidney Ca, Nuclear grade 3 (OD04348) | 1.0 |
| Kidney Margin (OD04348) | 1.5 |
| Kidney Cancer (OD04622-01) | 0.9 |
| Kidney Margin (OD04622-03) | 0.2 |
| Kidney Cancer (OD04450-01) | 1.1 |
| Kidney Margin (OD04450-03) | 1.4 |
| Kidney Cancer 8120607 | 0.5 |
| Kidney Margin 8120608 | 0.3 |
| Kidney Cancer 8120613 | 0.4 |
| Kidney Margin 8120614 | 0.2 |
| Kidney Cancer 9010320 | 0.8 |
| Kidney Margin 9010321 | 0.5 |
| Normal Uterus | 0.0 |
| Uterine Cancer 064011 | 1.8 |
| Normal Thyroid | 1.4 |
| Thyroid Cancer | 1.7 |
| Thyroid Cancer A302152 | 0.9 |
| Thyroid Margin A302153 | 1.5 |
| Normal Breast | 3.9 |
| Breast Cancer | 19.8 |
| Breast Cancer (OD04590-01) | 46.7 |
| Breast Cancer Mets (OD04590-03) | 43.2 |
| Breast Cancer Metastasis | 100.0 |
| Breast Cancer | 2.4 |
| Breast Cancer | 2.5 |
| Breast Cancer 9100266 | 41.2 |
| Breast Margin 9100265 | 5.0 |
| Breast Cancer A209073 | 4.0 |
| Breast Margin A209073 | 4.1 |
| Normal Liver | 0.2 |
| Liver Cancer | 0.2 |
| Liver Cancer 1025 | 0.2 |
| Liver Cancer 1026 | 0.3 |
| Liver Cancer 6004-T | 0.2 |
| Liver Tissue 6004-N | 0.5 |
| Liver Cancer 6005-T | 0.2 |
| Liver Tissue 6005-N | 0.1 |
| Normal Bladder | 1.5 |
| Bladder Cancer | 0.3 |
| Bladder Cancer | 1.7 |
| Bladder Cancer (OD04718-01) | 3.0 |
| Bladder Normal Adjacent (OD04718-03) | 2.9 |
| Normal Ovary | 0.3 |
| Ovarian Cancer | 3.3 |
| Ovarian Cancer (OD04768-07) | 3.1 |
| Ovary Margin (OD04768-08) | 0.4 |
| Normal Stomach | 0.5 |
| Gastric Cancer 9060358 | 0.2 |
| Stomach Margin 9060359 | 0.4 |
| Gastric Cancer 9060395 | 0.8 |
| Stomach Margin 9060394 | 0.5 |
| Gastric Cancer 9060397 | 1.0 |
| Stomach Margin 9060396 | 0.1 |
| Gastric Cancer 064005 | 1.0 |

Column A - Rel. Exp. (%) Ag2169, Run 148722818

[0488] TABLE FF
Panel 3D

| Tissue Name | A |
|---|---|
| 94905 Daoy Medulloblastoma/Cerebellum | 3.2 |
| 94906 TE671 Medulloblastom/Cerebellum | 1.2 |
| 94907 D283 Med Medulloblastoma/Cerebellum | 19.2 |
| 94908 PFSK-1 Primitive Neuroectodermal/Cerebellum | 16.4 |
| 94909 XF-498 CNS | 15.5 |
| 94910 SNB-78 CNS/glioma | 20.3 |
| 94911 SF-268 CNS/glioblastoma | 2.5 |
| 94912 T98G Glioblastoma | 5.4 |
| 96776 SK-N-SH Neuroblastoma (metastasis) | 16.5 |
| 94913 SF-295 CNS/glioblastoma | 7.2 |
| 94914 Cerebellum | 6.1 |
| 96777 Cerebellum | 2.5 |
| 94916 NCI-H292 Mucoepidermoid lung carcinoma | 32.8 |
| 94917 DMS-114 Small cell lung cancer | 9.1 |
| 94918 DMS-79 Small cell lung cancer/neuroendocrine | 100.0 |
| 94919 NCI-H146 Small cell lung cancer/neuroendocrine | 31.6 |
| 94920 NCI-H526 Small cell lung cancer/neuroendocrine | 25.0 |
| 94921 NCI-N417 Small cell lung cancer/neuroendocrine | 5.0 |
| 94923 NCI-H82 Small cell lung cancer/neuroendocrine | 10.1 |
| 94924 NCI-H157 Squamous cell lung cancer (metastasis) | 12.9 |
| 94925 NCI-H1155 Large cell lung cancer/neuroendocrine | 17.7 |
| 94926 NCI-H1299 Large cell lung cancer/neuroendocrine | 15.0 |
| 94927 NCI-H727 Lung carcinoid | 4.0 |
| 94928 NCI-UMC-11 Lung carcinoid | 21.3 |
| 94929 LX-1 Small cell lung cancer | 6.1 |
| 94930 Colo-205 Colon cancer | 3.9 |
| 94931 KM12 Colon cancer | 6.1 |
| 94932 KM20L2 Colon cancer | 3.5 |
| 94933 NCI-H716 Colon cancer | 8.8 |
| 94935 SW-48 Colon adenocarcinoma | 4.2 |
| 94936 SW1116 Colon adenocarcinoma | 6.3 |
| 94937 LS 174T Colon adenocarcinoma | 3.4 |
| 94938 SW-948 Colon adenocarcinoma | 0.8 |
| 94939 SW-480 Colon adenocarcinoma | 3.2 |
| 94940 NCI-SNU-5 Gastric carcinoma | 1.4 |
| KATO III- Gastric carcinoma | 11.0 |
| 94943 NCI-SNU-16 Gastric carcinoma | 7.2 |
| 94944 NCI-SNU-1 Gastric carcinoma | 9.2 |
| 94946 RF-1 Gastric adenocarcinoma | 6.1 |
| 94947 RF-48 Gastric adenocarcinoma | 9.5 |
| 96778 MKN-45 Gastric carcinoma | 12.8 |
| 94949 NCI-N87 Gastric carcinoma | 4.4 |
| 94951 OVCAR-5 Ovarian carcinoma | 0.5 |
| 94952 RL95-2 Uterine carcinoma | 5.4 |
| 94953 HelaS3 Cervical adenocarcinoma | 11.7 |
| 94954 Ca Ski Cervical epidermoid carcinoma (metastasis | 11.6 |
| 94955 ES-2 Ovarian clear cell carcinoma | 4.4 |
| 94957 Ramos Stimulated with PMA/ionomycin 6 h | 5.0 |
| 94958 Ramos Stimulated with PMA/ionomycin 14 h | 6.2 |
| 94962 MEG-01 Chronic myelogenous leukemia (megokaryoblast) | 3.3 |
| 94963 Raji Burkitt's lymphoma | 1.2 |
| 94964 Daudi Burkitt's lymphoma | 4.6 |
| 94965 U266 B-cell plasmacytoma/myeloma | 11.4 |
| 94968 CA46 Burkitt's lymphoma | 2.1 |
| 94970 RL non-Hodgkin's B-cell lymphoma | 0.6 |
| 94972 JM1 pre-B-cell lymphoma/leukemia | 3.0 |
| 94973 Jurkat T cell leukemia | 11.7 |
| 94974 TF-1 Erythroleukemia | 2.9 |
| 94975 HUT 78 T-cell lymphoma | 2.9 |
| 94977 U937 Histiocytic lymphoma | 4.2 |
| 94980 KU-812 Myelogenous leukemia | 1.3 |
| 769-P- Clear cell renal carcinoma | 11.3 |
| 94983 Caki-2 Clear cell renal carcinoma | 8.0 |
| 94984 SW 839 Clear cell renal carcinoma | 2.6 |
| 94986 G401 Wilms' tumor | 4.1 |
| 94987 Hs766T Pancreatic carcinoma (LN metastasis) | 12.3 |
| 94988 CAPAN-1 Pancreatic adenocarcinoma (liver metastasis) | 2.2 |
| 94989 SU86.86 Pancreatic carcinoma (liver metastasis) | 3.2 |
| 94990 BxPC-3 Pancreatic adenocarcinoma | 4.8 |
| 94991 HPAC Pancreatic adenocarcinoma | 10.4 |
| 94992 MIA PaCa-2 Pancreatic carcinoma | 3.4 |
| 94993 CFPAC-1 Pancreatic ductal adenocarcinoma | 22.1 |
| 94994 PANC-1 Pancreatic epithelioid ductal carcinoma | 14.1 |
| 94996 T24 Bladder carcinma (transitional cell | 10.7 |
| 5637- Bladder carcinoma | 11.8 |
| 94998 HT-1197 Bladder carcinoma | 4.2 |
| 94999 UM-UC-3 Bladder carcinma (transitional cell) | 2.5 |
| 95000 A204 Rhabdomyosarcoma | 4.3 |
| 95001 HT-1080 Fibrosarcoma | 15.3 |
| 95002 MG-63 Osteosarcoma (bone) | 3.5 |
| 95003 SK-LMS-1 Leiomyosarcoma (vulva) | 10.2 |
| 95004 SJRH30 Rhabdomyosarcoma (met to bone marrow) | 3.1 |
| 95005 A431 Epidermoid carcinoma | 4.8 |
| 95007 WM266-4 Melanoma | 11.0 |
| DU 145- Prostate carcinoma (brain metastasis) | 0.0 |
| 95012 MDA-MB-468 Breast adenocarcinoma | 5.5 |
| SCC-4- Squamous cell carcinoma of tongue | 0.0 |
| SCC-9- Squamous cell carcinoma of tongue | 0.0 |
| SCC-15- Squamous cell carcinoma of tongue | 0.0 |
| 95017 CAL 27 Squamous cell carcinoma of tongue | 7.3 |

Column A - Rel. Exp. (%) Ag2169, Run 170745433

[0489] TABLE FG
Panel 4D

| Tissue Name | A |
|---|---|
| Secondary Th1 act | 12.9 |
| Secondary Th2 act | 15.3 |
| Secondary Tr1 act | 17.6 |
| Secondary Th1 rest | 2.2 |
| Secondary Th2 rest | 2.9 |
| Secondary Tr1 rest | 3.7 |
| Primary Th1 act | 18.7 |
| Primary Th2 act | 23.8 |
| Primary Tr1 act | 24.3 |
| Primary Th1 rest | 17.4 |
| Primary Th2 rest | 6.0 |
| Primary Tr1 rest | 6.2 |
| CD45RA CD4 lymphocyte act | 12.9 |
| CD45RO CD4 lymphocyte act | 21.2 |
| CD8 lymphocyte act | 8.9 |
| Secondary CD8 lymphocyte rest | 9.5 |
| Secondary CD8 lymphocyte act | 5.4 |
| CD4 lymphocyte none | 1.6 |
| 2ry Th1/Th2/Tr1 anti-CD95 CH11 | 3.8 |
| LAK cells rest | 8.4 |
| LAK cells IL-2 | 8.2 |
| LAK cells IL-2 + IL-12 | 13.3 |
| LAK cells IL-2 + IFN gamma | 17.1 |
| LAK cells IL-2 + IL-18 | 14.7 |
| LAK cells PMA/ionomycin | 9.2 |
| NK Cells IL-2 rest | 7.0 |
| Two Way MLR 3 day | 7.3 |
| Two Way MLR 5 day | 7.3 |
| Two Way MLR 7 day | 6.2 |
| PBMC rest | 1.9 |
| PBMC PWM | 41.2 |
| PBMC PHA-L | 14.8 |
| Ramos (B cell) none | 9.7 |
| Ramos (B cell) ionomycin | 47.6 |
| B lymphocytes PWM | 71.2 |
| B lymphocytes CD40L and IL-4 | 9.1 |
| EOL-1 dbcAMP | 9.8 |
| EOL-1 dbcAMP PMA/ionomycin | 7.2 |
| Dendritic cells none | 9.6 |
| Dendritic cells LPS | 18.3 |
| Dendritic cells anti-CD40 | 12.2 |
| Monocytes rest | 5.7 |
| Monocytes LPS | 8.0 |
| Macrophages rest | 12.3 |
| Macrophages LPS | 4.8 |
| HUVEC none | 3.9 |
| HUVEC starved | 8.8 |
| HUVEC IL-1beta | 4.1 |
| HUVEC IFN gamma | 3.5 |
| HUVEC TNF alpha + IFN gamma | 9.3 |
| HUVEC TNF alpha + IL4 | 4.8 |
| HUVEC IL-11 | 1.2 |
| Lung Microvascular EC none | 4.2 |
| Lung Microvascular EC TNFalpha + IL-1beta | 7.3 |
| Microvascular Dermal EC none | 4.3 |
| Microsvasular Dermal EC TNFalpha + IL-1beta | 7.0 |
| Bronchial epithelium TNFalpha + IL1beta | 24.1 |
| Small airway epithelium none | 15.7 |
| Small airway epithelium TNFalpha + IL-1beta | 100.0 |
| Coronery artery SMC rest | 18.9 |
| Coronery artery SMC TNFalpha + IL-1beta | 13.9 |
| Astrocytes rest | 16.7 |
| Astrocytes TNFalpha + IL-1beta | 15.2 |
| KU-812 (Basophil) rest | 1.1 |
| KU-812 (Basophil) PMA/ionomycin | 5.5 |
| CCD1106 (Keratinocytes) none | 14.8 |
| CCD1106 (Keratinocytes) TNFalpha + IL-1beta | 2.9 |
| Liver cirrhosis | 0.9 |
| Lupus kidney | 1.5 |
| NCI-H292 none | 30.8 |
| NCI-H292 IL-4 | 40.6 |
| NCI-H292 IL-9 | 35.8 |
| NCI-H292 IL-13 | 17.7 |
| NCI-H292 IFN gamma | 23.8 |
| HPAEC none | 2.0 |
| HPAEC TNF alpha + IL-1 beta | 9.6 |
| Lung fibroblast none | 15.2 |
| Lung fibroblast TNF alpha + IL-1 beta | 15.3 |
| Lung fibroblast IL-4 | 37.4 |
| Lung fibroblast IL-9 | 23.2 |
| Lung fibroblast IL-13 | 23.5 |
| Lung fibroblast IFN gamma | 38.7 |
| Dermal fibroblast CCD1070 rest | 36.3 |
| Dermal fibroblast CCD1070 TNF alpha | 46.3 |
| Dermal fibroblast CCD1070 IL-1 beta | 18.6 |
| Dermal fibroblast IFN gamma | 14.5 |
| Dermal fibroblast IL-4 | 29.9 |
| IBD Colitis 2 | 0.2 |
| IBD Crohn's | 0.5 |
| Colon | 4.9 |
| Lung | 8.1 |
| Thymus | 14.8 |
| Kidney | 7.1 |

Column A - Rel. Exp. (%) Ag2169, Run 148725333

[0490] TABLE FH
general oncology screening panel v 2.4

| Tissue Name | A |
|---|---|
| Colon cancer 1 | 10.3 |
| CC Margin (ODO3921) | 5.6 |
| Colon cancer 2 | 34.4 |
| Colon NAT 2 | 4.7 |
| Colon cancer 3 | 31.2 |
| Colon NAT 3 | 9.2 |
| Colon malignant cancer 4 | 44.4 |
| Colon NAT 4 | 2.8 |
| Lung cancer 1 | 7.5 |
| Lung NAT 1 | 1.8 |
| Lung cancer 2 | 39.2 |
| Lung NAT 2 | 2.0 |
| Squamous cell carcinoma 3 | 27.9 |
| Lung NAT 3 | 0.5 |
| Metastatic melanoma 1 | 33.7 |
| Melanoma 2 | 4.2 |
| Melanoma 3 | 6.3 |
| Metastatic melanoma 4 | 56.6 |
| Metastatic melanoma 5 | 58.6 |
| Bladder cancer 1 | 2.8 |
| Bladder NAT 1 | 0.0 |
| Bladder cancer 2 | 11.7 |
| Bladder NAT 2 | 0.6 |
| Bladder NAT 3 | 1.3 |
| Bladder NAT 4 | 3.2 |
| Prostate adenocarcinoma 1 | 43.5 |
| Prostate adenocarcinoma 2 | 8.4 |
| Adenocarcinoma of the prostate | 100.0 |
| Prostate adenocarcinoma 4 | 9.7 |
| Prostate NAT 5 | 20.3 |
| Prostate adenocarcinoma 6 | 33.7 |
| Prostate adenocarcinoma 7 | 24.7 |
| Prostate adenocarcinoma 8 | 7.4 |
| Prostate adenocarcinoma 9 | 70.7 |
| Prostate NAT 10 | 11.1 |
| Kidney cancer 1 | 9.2 |
| Kidney NAT 1 | 5.7 |
| Kidney cancer 2 | 27.7 |
| Kidney NAT 2 | 19.3 |
| Kidney cancer 3 | 5.6 |
| Kidney NAT 3 | 5.6 |
| Kidney cancer 4 | 14.4 |
| Kidney NAT 4 | 7.5 |

Column A - Rel. Exp. (%) Ag219, Run 258707952

[0491] Ardais Panel 1.1 Summary: Ag2169 Highest gene expression was detected in a lung cancer samples (CT=24.2). Thus, expression of this gene can be used to differentiate between lung cancer tissue and normal lung tissue and as a marker of lung cancer. Therapeutic modulation of this gene, expressed protein and/or use of antibodies or small molecule drugs targeting the gene or gene product are useful in the treatment of lung cancer

[0492] Panel 1.3D Summary: Ag2169 The expression of this gene was highest in a sample of breast cancer cell line (MCF-7)(CTs=26). Therapeutic modulation of this gene, through the use of small molecule drugs, antibodies or protein therapeutics is useful in the treatment of breast cancer. Differential expression of this gene can be used to differentiate between breast cancer cells and normal breast cells. This gene was moderately expressed in a variety of metabolic tissues, including pancreas, adrenal, thyroid, pituitary, adult and fetal heart, fetal liver and adipose. As a zinc transporter, this gene is a potential target for the enhancement of insulin secretion and sensitivity in Type 2 diabetes. Therapeutic modulation of this gene, expressed protein and/or use of antibodies or small molecule drugs targeting the gene or gene product are useful in the treatment of metabolic and endocrine disease, including obesity and Types 1 and 2 diabetes. This gene is differentially expressed in fetal (CTs=31-32) vs adult skeletal muscle (CTs=34-35). The relative overexpression of this gene in fetal skeletal muscle suggests that the protein product may enhance muscular growth or development in the fetus and thus may also act in a regenerative capacity in the adult. Therapeutic modulation of this gene, expressed protein and/or use of antibodies or small molecule drugs targeting the gene or gene product are useful for restoring muscle mass or function in weak or dystrophic muscle. Among tissues of CNS origin, gene expression was moderate in all regions examined. This gene, a LIV-1 homolog, is involved in zinc homeostasis. Zinc is critical to brain functions as it serves as an endogenous neuromodulator in synaptic neurotransmission. Therapeutic modulation of this gene, expressed protein and/or use of antibodies or small molecule drugs targeting the gene or gene product are useful in the treatment of learning deficiencies and seizure disorders associated with improper zinc trafficking.

[0493] Panel 2.2 and 2D Summary: Ag2169 Gene expression was detected in breast cancer, while expression of this gene in other tissues was almost absent with the exception of prostate derived samples. Gene expression is useful distinguish breast cancer samples from the other samples in the panel. Therapeutic modulation of this gene, expressed protein and/or use of antibodies or small molecule drugs targeting the gene or gene product are useful in the treatment of breast cancer.

[0494] Panel 3D Summary: Ag2169 The expression of this gene was highest in a sample derived from a lung cancer cell line (DMS 79)(CT=27.8). There were significant levels of expression in other lung cancer cell lines. The expression of this gene can be used to distinguish DMS 79 cells from other samples in the panel. Therapeutic modulation of this gene, expressed protein and/or use of antibodies or small molecule drugs targeting the gene or gene product are useful in the treatment of lung cancer.

[0495] Panel 4D Summary: Ag2169 The highest expression of this gene was seen in small airway epithelium stimulated with TNF-alpha and IL-1 beta (CTs=27). Moderate expression levels were also seen in pokeweed mitogen-activated peripheral blood mononuclear cells (mainly B cells), ionomycin-activated Ramos B cell, pokeweed mitogen-activated purified peripheral blood B lymphocytes, B lymphocytes activated with CD40L and IL-4, and a number of cytokine-activated and resting cells including NCI-H292 pulmonary mucoepidermoid epithelial cells, lung fibroblasts, and dermal fibroblasts. Based expression in cytokine-activated B cells and cells in lung and skin, therapeutic modulation of this gene, expressed protein and/or use of antibodies or small molecule drugs targeting the gene or gene product are useful in the treatment of autoimmune and inflammatory diseases in which activated B cells present antigens generating aberrant immune responses, such as, but not limited to Crohn's disease, ulcerative colitis, multiple sclerosis, chronic obstructive pulmonary disease, asthma, emphysema, rheumatoid arthritis, or psoriasis.

[0496] general oncology screening panel_V_{—}2.4 Summary: Ag2169 High gene expression was seen in a prostate cancer, with prominent expression seen in melanoma (CT=28.7) and in colon cancer but not adjacent normal colon tissue. Expression of this gene is useful to differentiate colon cancer from normal colon tissue. Therapeutic modulation of this gene, expressed protein and/or use of antibodies or small molecule drugs targeting the gene or gene product are useful in the treatment of prostate, colon cancer and melanoma.

[0497] G. NOV10, CG59356-01: Nuclear Receptor Subfamily 4.

[0498] Expression of gene CG59356-01 was assessed using the primer-probe set Ag3554, described in TableGA. Results of the RTQ-PCR runs are shown in Tables GB, GC, GD, GE and GF.

TABLE GA
Probe Name Ag3554

| | | | Start | SEQ |
|---|---|---|---|---|
| Primers | Sequences | Length | Position | ID No |
| Forward | 5′-atacacagacgcgctcac | 19 | 104 | 176 |
| | a-3′ | | | |
| Probe | TET-5′-ctccctcactcgaa | 26 | 127 | 177 |
| | cacacagacaca-3′-TAMRA | | | |
| Reverse | 5′-ggagagcgaagtgtgtgt | 20 | 173 | 178 |
| | gt-3′ | | | |

[0499] TABLE GB
AI comprehensive panel v1.0

| Tissue Name | A |
|---|---|
| 110967 COPD-F | 2.0 |
| 110980 COPD-F | 1.0 |
| 110968 COPD-M | 2.2 |
| 110977 COPD-M | 13.7 |
| 110989 Emphysema-F | 0.9 |
| 110992 Emphysema-F | 0.0 |
| 110993 Emphysema-F | 0.1 |
| 110994 Emphysema-F | 0.2 |
| 110995 Emphysema-F | 0.0 |
| 110996 Emphysema-F | 0.0 |
| 110997 Asthma-M | 0.0 |
| 111001 Asthma-F | 0.1 |
| 111002 Asthma-F | 0.3 |
| 111003 Atopic Asthma-F | 0.6 |
| 111004 Atopic Asthma-F | 3.6 |
| 111005 Atopic Asthma-F | 0.2 |
| 111006 Atopic Asthma-F | 0.0 |
| 111417 Allergy-M | 0.2 |
| 112347 Allergy-M | 0.0 |
| 112349 Normal Lung-F | 0.0 |
| 112357 Normal Lung-F | 100.0 |
| 112354 Normal Lung-M | 34.4 |
| 112374 Crohns-F | 0.3 |
| 112389 Match Control Crohns-F | 1.0 |
| 112375 Crohns-F | 0.1 |
| 112732 Match Control Crohns-F | 0.0 |
| 112725 Crohns-M | 0.0 |
| 112387 Match Control Crohns-M | 0.7 |
| 112378 Crohns-M | 0.0 |
| 112390 Match Control Crohns-M | 0.3 |
| 112726 Crohns-M | 28.7 |
| 112731 Match Control Crohns-M | 7.0 |
| 112380 Ulcer Col-F | 1.5 |
| 112734 Match Control Ulcer Col-F | 9.3 |
| 112384 Ulcer Col-F | 23.0 |
| 112737 Match Control Ulcer Col-F | 6.7 |
| 112386 Ulcer Col-F | 0.0 |
| 112738 Match Control Ulcer Col-F | 1.5 |
| 112381 Ulcer Col-M | 0.0 |
| 112735 Match Control Ulcer Col-M | 0.0 |
| 112382 Ulcer Col-M | 2.3 |
| 112394 Match Control Ulcer Col-M | 0.0 |
| 112383 Ulcer Col-M | 17.8 |
| 112736 Match Control Ulcer Col-M | 0.1 |
| 112423 Psoriasis-F | 29.5 |
| 112427 Match Control Psoriasis-F | 13.9 |
| 112418 Psoriasis-M | 1.7 |
| 112723 Match Control Psoriasis-M | 0.0 |
| 112419 Psoriasis-M | 3.9 |
| 112424 Match Control Psoriasis-M | 1.1 |
| 112420 Psoriasis-M | 0.3 |
| 112425 Match Control Psoriasis-M | 1.4 |
| 104689 (MF) OA Bone-Backus | 0.0 |
| 104690 (MF) Adj “Normal” Bone-Backus | 0.0 |
| 104691 (MF) OA Synovium-Backus | 0.0 |
| 104692 (BA) OA Cartilage-Backus | 0.0 |
| 104694 (BA) OA Bone-Backus | 0.0 |
| 104695 (BA) Adj “Normal” Bone-Backus | 0.0 |
| 104696 (BA) OA Synovium-Backus | 0.9 |
| 104700 (SS) OA Bone-Backus | 0.0 |
| 104701 (SS) Adj “Normal” Bone-Backus | 0.1 |
| 104702 (SS) OA Synovium-Backus | 0.6 |
| 117093 OA Cartilage Rep7 | 0.2 |
| 112672 OA Bone5 | 1.0 |
| 112673 OA Synovium5 | 0.0 |
| 112674 OA Synovial Fluid cells5 | 0.0 |
| 117100 OA Cartilage Rep14 | 0.0 |
| 112756 OA Bone9 | 0.0 |
| 112757 OA Synovium9 | 0.0 |
| 112758 OA Synovial Fluid Cells9 | 0.0 |
| 117125 RA Cartilage Rep2 | 8.2 |
| 113492 Bone2 RA | 27.4 |
| 113493 Synovium2 RA | 24.7 |
| 113494 Syn Fluid Cells RA | 41.5 |
| 113499 Cartilage4 RA | 31.9 |
| 113500 Bone4 RA | 40.9 |
| 113501 Synovium4 RA | 22.2 |
| 113502 Syn Fluid Cells4 RA | 13.4 |
| 113495 Cartilage3 RA | 32.1 |
| 113496 Bone3 RA | 40.3 |
| 113497 Synovium3 RA | 34.2 |
| 113498 Syn Fluid Cells3 RA | 39.0 |
| 117106 Normal Cartilage Rep20 | 0.0 |
| 113663 Bone3 Normal | 0.0 |
| 113664 Synovium3 Normal | 0.0 |
| 113665 Syn Fluid Cells3 Normal | 0.0 |
| 117107 Normal Cartilage Rep22 | 0.1 |
| 113667 Bone4 Normal | 7.1 |
| 113668 Synovium4 Normal | 7.6 |
| 113669 Syn Fluid Cells4 Normal | 11.2 |

Column A - Rel. Ex. (%) Ag3554, Run 244570378

[0500] TABLE GC
General screening panel v1.4

| Tissue Name | A |
|---|---|
| Adipose | 22.7 |
| Melanoma* Hs688(A).T | 0.4 |
| Melanoma* Hs688(B).T | 0.8 |
| Melanoma* M14 | 3.1 |
| Melanoma* LOXIMVI | 0.1 |
| Melanoma* SK-MEL-5 | 42.9 |
| Squamous cell carcinoma SCC-4 | 0.0 |
| Testis Pool | 1.6 |
| Prostate ca.* (bone met) PC-3 | 0.0 |
| Prostate Pool | 4.5 |
| Placenta | 0.7 |
| Uterus Pool | 0.3 |
| Ovarian ca. OVCAR-3 | 0.0 |
| Ovarian ca. SK-OV-3 | 0.0 |
| Ovarian ca. OVCAR-4 | 0.0 |
| Ovarian ca. OVCAR-5 | 0.0 |
| Ovarian ca. IGROV-1 | 0.1 |
| Ovarian ca. OVCAR-8 | 0.0 |
| Ovary | 9.7 |
| Breast ca. MCF-7 | 0.3 |
| Breast ca. MDA-MB-231 | 0.4 |
| Breast ca. BT 549 | 10.4 |
| Breast ca. T47D | 0.3 |
| Breast ca. MDA-N | 1.9 |
| Breast Pool | 5.1 |
| Trachea | 12.4 |
| Lung | 13.3 |
| Fetal Lung | 100.0 |
| Lung ca. NCI-N417 | 0.0 |
| Lung ca. LX-1 | 0.0 |
| Lung ca. NCI-H146 | 0.0 |
| Lung ca. SHP-77 | 1.0 |
| Lung ca. A549 | 2.0 |
| Lung ca. NCI-H526 | 0.1 |
| Lung ca. NCI-H23 | 6.1 |
| Lung ca. NCI-H460 | 6.1 |
| Lung ca. HOP-62 | 0.0 |
| Lung ca. NCI-H522 | 0.1 |
| Liver | 0.1 |
| Fetal Liver | 0.0 |
| Liver ca. HepG2 | 0.0 |
| Kidney Pool | 10.5 |
| Fetal Kidney | 0.7 |
| Renal ca. 786-0 | 0.0 |
| Renal ca. A498 | 0.0 |
| Renal ca. ACHN | 0.0 |
| Renal ca. UO-31 | 0.0 |
| Renal ca. TK-10 | 0.3 |
| Bladder | 2.7 |
| Gastric ca. (liver met.) NCI-N87 | 0.8 |
| Gastric ca. KATO III | 0.1 |
| Colon ca. SW-948 | 0.0 |
| Colon ca. SW480 | 0.1 |
| Colon ca.* (SW480 met) SW620 | 0.0 |
| Colon ca. HT29 | 0.0 |
| Colon ca. HCT-116 | 0.0 |
| Colon ca. CaCo-2 | 0.0 |
| Colon cancer tissue | 27.5 |
| Colon ca. SW1116 | 0.0 |
| Colon ca. Colo-205 | 0.0 |
| Colon ca. SW-48 | 0.0 |
| Colon Pool | 2.6 |
| Small Intestine Pool | 20.6 |
| Stomach Pool | 6.9 |
| Bone Marrow Pool | 0.5 |
| Fetal Heart | 18.2 |
| Heart Pool | 17.9 |
| Lymph Node Pool | 4.2 |
| Fetal Skeletal Muscle | 2.6 |
| Skeletal Muscle Pool | 59.9 |
| Spleen Pool | 37.6 |
| Thymus Pool | 1.9 |
| CNS cancer (glio/astro) U87-MG | 0.2 |
| CNS cancer (glio/astro) U-118-MG | 4.8 |
| CNS cancer (neuro; met) SK-N-AS | 0.0 |
| CNS cancer (astro) SF-539 | 0.0 |
| CNS cancer (astro) SNB-75 | 2.7 |
| CNS cancer (glio) SNB-19 | 0.1 |
| CNS cancer (glio) SF-295 | 0.0 |
| Brain (Amygdala) Pool | 3.6 |
| Brain (cerebellum) | 9.7 |
| Brain (fetal) | 5.0 |
| Brain (Hippocampus) Pool | 6.3 |
| Cerebral Cortex Pool | 2.0 |
| Brain (Substantia nigra) Pool | 8.5 |
| Brain (Thalamus) Pool | 4.8 |
| Brain (whole) | 3.5 |
| Spinal Cord Pool | 7.4 |
| Adrenal Gland | 39.2 |
| Pituitary gland Pool | 10.4 |
| Salivary Gland | 3.3 |
| Thyroid (female) | 26.4 |
| Pancreatic ca. CAPAN2 | 0.0 |
| Pancreas Pool | 1.1 |

Column A - Rel. Exp (%) Ag3554, Run 217049423

[0501] TABLE GD
Panel 4.1D

| Tissue Name | A |
|---|---|
| Secondary Th1 act | 8.4 |
| Secondary Th2 act | 29.3 |
| Secondary Tr1 act | 6.4 |
| Secondary Th1 rest | 0.0 |
| Secondary Th2 rest | 0.0 |
| Secondary Tr1 rest | 0.0 |
| Primary Th1 act | 0.0 |
| Primary Th2 act | 51.4 |
| Primary Tr1 act | 45.4 |
| Primary Th1 rest | 0.0 |
| Primary Th2 rest | 0.0 |
| Primary Tr1 rest | 0.0 |
| CD45RA CD4 lymphocyte act | 1.4 |
| CD45RO CD4 lymphocyte act | 6.5 |
| CD8 lymphocyte act | 0.0 |
| Secondary CD8 lymphocyte rest | 3.1 |
| Secondary CD8 lymphocyte act | 0.6 |
| CD4 lymphocyte none | 0.0 |
| 2ry Th1/Th2/Tr1 anti-CD95 CH11 | 0.0 |
| LAK cells rest | 1.6 |
| LAK cells IL-2 | 0.0 |
| LAK cells IL-2 + IL-12 | 0.0 |
| LAK cells IL-2 + IFN gamma | 0.0 |
| LAK cells IL-2 + IL-18 | 0.0 |
| LAK cells PMA/ionomycin | 100.0 |
| NK Cells IL-2 rest | 0.3 |
| Two Way MLR 3 day | 0.0 |
| Two Way MLR 5 day | 0.0 |
| Two Way MLR 7 day | 0.0 |
| PBMC rest | 0.0 |
| PBMC PWM | 0.1 |
| PBMC PHA-L | 2.0 |
| Ramos (B cell) none | 0.0 |
| Ramos (B cell) ionomycin | 0.0 |
| B lymphocytes PWM | 11.2 |
| B lymphocytes CD40L and IL-4 | 11.7 |
| EOL-1 dbcAMP | 0.0 |
| EOL-1 dbcAMP PMA/ionomycin | 1.7 |
| Dendritic cells none | 9.7 |
| Dendritic cells LPS | 8.1 |
| Dendritic cells anti-CD40 | 2.4 |
| Monocytes rest | 0.0 |
| Monocytes LPS | 17.4 |
| Macrophages rest | 0.0 |
| Macrophages LPS | 6.0 |
| HUVEC none | 0.0 |
| HUVEC starved | 0.0 |
| HUVEC IL-1beta | 0.6 |
| HUVEC IFN gamma | 0.0 |
| HUVEC TNF alpha + IFN gamma | 0.0 |
| HUVEC TNF alpha + IL4 | 0.0 |
| HUVEC IL-11 | 0.0 |
| Lung Microvascular EC none | 0.0 |
| Lung Microvascular EC TNFalpha + IL-1beta | 0.0 |
| Microvascular Dermal EC none | 0.0 |
| Microsvasular Dermal EC TNFalpha + IL-1beta | 0.0 |
| Bronchial epithelium TNFalpha + IL1beta | 0.0 |
| Small airway epithelium none | 0.0 |
| Small airway epithelium TNFalpha + IL-1beta | 0.0 |
| Coronery artery SMC rest | 0.0 |
| Coronery artery SMC TNFalpha + IL-1beta | 0.0 |
| Astrocytes rest | 0.0 |
| Astrocytes TNFalpha + IL-1beta | 0.0 |
| KU-812 (Basophil) rest | 0.0 |
| KU-812 (Basophil) PMA/ionomycin | 0.0 |
| CCD1106 (Keratinocytes) none | 0.0 |
| CCD1106 (Keratinocytes) TNFalpha + IL-1beta | 0.0 |
| Liver cirrhosis | 6.2 |
| NCI-H292 none | 0.0 |
| NCI-H292 IL-4 | 0.1 |
| NCI-H292 IL-9 | 0.3 |
| NCI-H292 IL-13 | 0.1 |
| NCI-H292 IFN gamma | 0.0 |
| HPAEC none | 0.0 |
| HPAEC TNF alpha + IL-1 beta | 1.0 |
| Lung fibroblast none | 2.2 |
| Lung fibroblast TNF alpha + IL-1 beta | 13.7 |
| Lung fibroblast IL-4 | 0.5 |
| Lung fibroblast IL-9 | 0.6 |
| Lung fibroblast IL-13 | 0.0 |
| Lung fibroblast IFN gamma | 24.1 |
| Dermal fibroblast CCD1070 rest | 0.0 |
| Dermal fibroblast CCD1070 TNF alpha | 1.5 |
| Dermal fibroblast CCD1070 IL-1 beta | 6.3 |
| Dermal fibroblast IFN gamma | 0.0 |
| Dermal fibroblast IL-4 | 0.0 |
| Dermal Fibroblasts rest | 0.0 |
| Neutrophils TNFa + LPS | 67.8 |
| Neutrophils rest | 0.0 |
| Colon | 0.0 |
| Lung | 0.0 |
| Thymus | 0.0 |
| Kidney | 0.1 |

Column A - Rel. Exp. (%) Ag3554, Run 244570242

[0502]

| Tissue Name | A |
|---|---|
| 97457 Patient-02go adipose | 0.0 |
| 97476 Patient-07sk skeletal muscle | 11.2 |
| 97477 Patient-07ut uterus | 0.0 |
| 97478 Patient-07pl placenta | 0.0 |
| 99167 Bayer Patient 1 | 0.6 |
| 97482 Patient-08ut uterus | 0.0 |
| 97483 Patient-08pl placenta | 0.0 |
| 97486 Patient-09sk skeletal muscle | 0.0 |
| 97487 Patient-09ut uterus | 0.0 |
| 97488 Patient-09pl placenta | 0.0 |
| 97492 Patient-10ut uterus | 0.0 |
| 97493 Patient-10pl placenta | 0.0 |
| 97495 Patient-11go adipose | 24.0 |
| 97496 Patient-11sk skeletal muscle | 4.0 |
| 97497 Patient-11ut uterus | 0.0 |
| 97498 Patient-11pl placenta | 0.0 |
| 97500 Patient-12go adipose | 20.6 |
| 97501 Patient-12sk skeletal muscle | 5.8 |
| 97502 Patient-12ut uterus | 0.1 |
| 97503 Patient-12pl placenta | 0.0 |
| 94721 Donor 2 U - A Mesenchymal Stem Cells | 0.0 |
| 94722 Donor 2 U - B Mesenchymal Stem Cells | 0.0 |
| 94723 Donor 2 U - C Mesenchymal Stem Cells | 0.0 |
| 94709 Donor 2 AM - A adipose | 0.0 |
| 94710 Donor 2 AM - B adipose | 0.0 |
| 94711 Donor 2 AM - C adipose | 0.0 |
| 94712 Donor 2 AD - A adipose | 0.0 |
| 94713 Donor 2 AD - B adipose | 0.0 |
| 94714 Donor 2 AD - C adipose | 0.0 |
| 94742 Donor 3 U - A Mesenchymal Stem Cells | 0.0 |
| 94743 Donor 3 U - B Mesenchymal Stem Cells | 0.0 |
| 94730 Donor 3 AM - A adipose | 0.0 |
| 94731 Donor 3 AM - B adipose | 0.0 |
| 94732 Donor 3 AM - C adipose | 0.0 |
| 94733 Donor 3 AD - A adipose | 0.0 |
| 94734 Donor 3 AD - B adipose | 0.0 |
| 94735 Donor 3 AD - C adipose | 0.0 |
| 77138 Liver HepG2untreated | 0.0 |
| 73556 Heart Cardiac stromal cells (primary) | 0.0 |
| 81735 Small Intestine | 0.0 |
| 72409 Kidney Proximal Convoluted Tubule | 0.0 |
| 82685 Small intestine Duodenum | 0.0 |
| 90650 Adrenal Adrenocortical adenoma | 100.0 |
| 72410 Kidney HRCE | 0.0 |
| 72411 Kidney HRE | 0.0 |
| 73139 Uterus Uterine smooth muscle cells | 0.0 |

Column A - Rel. Exp. (%) Ag3554, Run 253329898

[0503] TABLE GF
general oncology screening panel v 2.4

| Tissue Name | A |
|---|---|
| Colon cancer 1 | 7.9 |
| CC Margin (ODO3921) | 3.9 |
| Colon cancer 2 | 0.8 |
| Colon NAT 2 | 0.3 |
| Colon cancer 3 | 2.4 |
| Colon NAT 3 | 4.0 |
| Colon malignant cancer 4 | 2.4 |
| Colon NAT 4 | 0.6 |
| Lung cancer 1 | 3.2 |
| Lung NAT 1 | 0.4 |
| Lung cancer 2 | 12.8 |
| Lung NAT 2 | 0.6 |
| Squamous cell carcinoma 3 | 2.5 |
| Lung NAT 3 | 0.0 |
| Metastatic melanoma 1 | 62.9 |
| Melanoma 2 | 0.0 |
| Melanoma 3 | 0.0 |
| Metastatic melanoma 4 | 100.0 |
| Metastatic melanoma 5 | 31.9 |
| Bladder cancer 1 | 0.4 |
| Bladder NAT 1 | 0.0 |
| Bladder cancer 2 | 0.0 |
| Bladder NAT 2 | 0.0 |
| Bladder NAT 3 | 0.0 |
| Bladder NAT 4 | 7.2 |
| Prostate adenocarcinoma 1 | 12.1 |
| Prostate adenocarcinoma 2 | 0.4 |
| Prostate adenocarcinoma 3 | 2.7 |
| Prostate adenocarcinoma 4 | 1.4 |
| Prostate NAT 5 | 0.3 |
| Prostate adenocarcinoma 6 | 1.9 |
| Prostate adenocarcinoma 7 | 4.8 |
| Prostate adenocarcinoma 8 | 0.1 |
| Prostate adenocarcinoma 9 | 9.3 |
| Prostate NAT 10 | 0.0 |
| Kidney cancer 1 | 39.0 |
| Kidney NAT 1 | 9.7 |
| Kidney cancer 2 | 22.1 |
| Kidney NAT 2 | 18.4 |
| Kidney cancer 3 | 7.0 |
| Kidney NAT 3 | 8.0 |
| Kidney cancer 4 | 5.6 |
| Kidney NAT 4 | 6.3 |

Column A - Rel. Exp. (%) Ag354, Run 259737951

[0504] Al_comprehensive panel_v1.0 Summary: Ag3554 The highest expression of this gene was detected in a normal lung sample (CT=26). This gene is downregulated in lung samples from patients suffering from COPD, emphysema or asthma. The gene's expression is useful in differentiating COPD, emphysema or asthma lung tissue from normal lung tissue. Therapeutic modulation of this gene or gene product is useful in the treatment of COPD, emphysema or asthma. This gene was upregulated in cartilage, bone, synovium and synovial fluid from rheumathoid arthritic patients and is therefore useful in differentiating these tissues from rheumathoid arthritic verses normal joints. Therapeutic modulation of this gene, expressed protein and/or use of antibodies or small molecule drugs targeting the gene or gene product are useful in the treatment of rheumathoid arthritis.

[0505] General_screening_panel_v1.4 Summary: Ag3554 Highest expression of this gene was detected in fetal lung (CT=25.2) and it was overexpressed as compared to adult lung. The gene product enhances lung growth or development in the fetus and thus can also act in a regenerative capacity in the adult. Therapeutic modulation of this gene, expressed protein and/or use of small molecule drugs targeting the gene or gene product are useful in the treatment of lung diseases. High to moderate levels of gene expression were seen in tissues with metabolic/endocrine functions including pancreas, adipose, adrenal gland, thyroid, pituitary gland, skeletal muscle, heart, liver and the gastrointestinal tract. Therapeutic modulation of this gene, expressed protein and/or use of small molecule drugs targeting the gene or gene product are useful in the treatment of endocrine/metabolically related diseases, such as obesity and diabetes. Moderate gene expression was seen in all regions of the central nervous system examined, including amygdala, hippocampus, substantia nigra, thalamus, cerebellum, cerebral cortex, and spinal cord. Therapeutic modulation of this gene, expressed protein and/or use of small molecule drugs targeting the gene or gene product are useful in the treatment of central nervous system disorders such as Alzheimer's disease, Parkinson's disease, epilepsy, multiple sclerosis, schizophrenia and depression.

[0506] Significant expression of this gene was also observed in colon cancer tissue and cell lines derived from melanoma, brain, gastric, lung and breast cancers. Gene expression is useful for differentiating these cancerous tissues from their normal counterparts. This gene encodes for nuclear receptor NOR1. In extraskeletal myxoid chondrosarcoma, chromosomal translocation creates a gene fusion between EWS and the orphan nuclear receptor NOR1, EWS/NOR1, which is believed to lead to malignant transformation by functioning as a transcriptional activator or regulator of mRNA splicing (Clark et. al., 1996 Oncogene 12: 229-235, PubMed ID: 8570200; Ohkura et al., 2002, J Biol Chem 277(1):535-43, PMID: 11673470). Therapeutic modulation of this gene, expressed protein and/or use of small molecule drugs targeting the gene or gene product are useful in the treatment of melanoma, chondrosarcoma, and brain, gastric, lung and breast cancers.

[0507] Panel 4.1 D Summary: Ag3554 The highest gene expression was detected in LAK cells treated with PMA and ionomycin (CT=25). This gene was upregulated in stimulated immune cells, including activated primary and secondary Th1 and Th2 cell, activated CD4 lymphocytes, lung fibroblasts treated with interferon gamma, lung fibroblasts treated with TNF alpha and IL-1 beta, and mononcytes and macrophages stimulated with LPS. The gene's expression is useful in differentiating these stimulated immune cell types from resting cells. Therapeutic modulation of this gene, expressed protein and/or use of antibodies or small molecule drugs targeting the gene or gene product are useful in the treatment of: immunosupressed individuals, inflammatory disorders and autoimmune diseases, such as asthma, emphysema, allergy, psoriasis, arthritis, ulcerative colitis, rheumatoid disease and inflammatory bowel disease.

[0508] Panel 5 Islet Summary: Ag3554 Highest expression of this gene was detected in adrenocortical adenoma sample (CT=27.9). Thus, this gene may play a role in tumor development. Therapeutic modulation of this gene, expressed protein and/or use of small molecule drugs targeting the gene or gene product are useful in the treatment of adrenocortical adenoma. Moderate levels of gene expression were detected in skeletal muscle and visceral adipose of obese and diabetic patients. Therapeutic modulation of this gene, expressed protein and/or use of small molecule drugs targeting the gene or gene product are useful in the treatment of obesity and diabetes.

[0509] general oncology screening panel_V_{—}2.4 Summary: Ag3554 The highest expression of this gene was detected in metastatic melanoma sample (CT=26) and this gene was overexpressed in colon, kidney, prostate and lung cancers when compared to normal adjacent tissues. Gene expression is useful in differentiating colon, kidney, prostate, lung cancer and melanoma tissues from their normal counterparts. Therapeutic modulation of this gene, expressed protein and/or use of antibodies or small molecule drugs targeting the gene or gene product are useful in the treatment of cancers of the colon, kidney, prostate, skin and lung.

[0510] H. NOV11, CG59889-01: KIAA1199, and CG59889-04: KIAA1199 Extension.

[0511] Expression of genes CG59889-01 and CG59889-04 was assessed using the primer-probe set Ag3626, described in Table HA. Results of the RTQ-PCR runs are shown in Tables HB, HC, HD and HE.

TABLE HA
Probe Name Ag3626

| | | | Start | SEQ |
|---|---|---|---|---|
| Primers | Sequences | Length | Position | ID No |
| Forward | 5′-ctgaggatcacaaagcca | 20 | 3750 | 179 |
| | aa-3′ | | | |
| Probe | TET-5′-atcttccaagttgt | 26 | 3770 | 180 |
| | gcccatccctgt-3′-TAMRA | | | |
| Reverse | 5′-cagctgtcctcacaactt | 22 | 3805 | 181 |
| | cttc-3′ | | | |

[0512] TABLE HB
AI comprehensive panel v1.0

| Tissue Name | A |
|---|---|
| 110967 COPD-F | 1.0 |
| 110980 COPD-F | 1.6 |
| 110968 COPD-M | 2.2 |
| 110977 COPD-M | 8.5 |
| 110989 Emphysema-F | 16.3 |
| 110992 Emphysema-F | 4.3 |
| 110993 Emphysema-F | 3.3 |
| 110994 Emphysema-F | 1.2 |
| 110995 Emphysema-F | 11.6 |
| 110996 Emphysema-F | 1.6 |
| 110997 Asthma-M | 0.9 |
| 111001 Asthma-F | 2.6 |
| 111002 Asthma-F | 9.2 |
| 111003 Atopic Asthma-F | 4.0 |
| 111004 Atopic Asthma-F | 7.6 |
| 111005 Atopic Asthma-F | 2.0 |
| 111006 Atopic Asthma-F | 2.4 |
| 111417 Allergy-M | 3.4 |
| 112347 Allergy-M | 0.4 |
| 112349 Normal Lung-F | 0.1 |
| 112357 Normal Lung-F | 13.8 |
| 112354 Normal Lung-M | 1.5 |
| 112374 Crohns-F | 28.9 |
| 112389 Match Control Crohns-F | 3.5 |
| 112375 Crohns-F | 43.8 |
| 112732 Match Control Crohns-F | 8.2 |
| 112725 Crohns-M | 6.1 |
| 112387 Match Control Crohns-M | 15.6 |
| 112378 Crohns-M | 0.2 |
| 112390 Match Control Crohns-M | 16.8 |
| 112726 Crohns-M | 6.5 |
| 112731 Match Control Crohns-M | 6.1 |
| 112380 Ulcer Col-F | 5.0 |
| 112734 Match Control Ulcer Col-F | 29.9 |
| 112384 Ulcer Col-F | 21.9 |
| 112737 Match Control Ulcer Col-F | 0.5 |
| 112386 Ulcer Col-F | 0.9 |
| 112738 Match Control Ulcer Col-F | 2.0 |
| 112381 Ulcer Col-M | 0.1 |
| 112735 Match Control Ulcer Col-M | 8.5 |
| 112382 Ulcer Col-M | 4.0 |
| 112394 Match Control Ulcer Col-M | 2.0 |
| 112383 Ulcer Col-M | 14.9 |
| 112736 Match Control Ulcer Col-M | 4.4 |
| 112423 Psoriasis-F | 3.3 |
| 112427 Match Control Psoriasis-F | 13.7 |
| 112418 Psoriasis-M | 1.8 |
| 112723 Match Control Psoriasis-M | 15.1 |
| 112419 Psoriasis-M | 4.6 |
| 112424 Match Control Psoriasis-M | 2.0 |
| 112420 Psoriasis-M | 12.2 |
| 112425 Match Control Psoriasis-M | 9.6 |
| 104689 (MF) OA Bone-Backus | 22.7 |
| 104690 (MF) Adj “Normal” Bone-Backus | 12.4 |
| 104691 (MF) OA Synovium-Backus | 28.5 |
| 104692 (BA) OA Cartilage-Backus | 45.1 |
| 104694 (BA) OA Bone-Backus | 39.8 |
| 104695 (BA) Adj “Normal” Bone-Backus | 26.2 |
| 104696 (BA) OA Synovium-Backus | 45.4 |
| 104700 (SS) OA Bone-Backus | 13.1 |
| 104701 (SS) Adj “Normal” Bone-Backus | 31.6 |
| 104702 (SS) OA Synovium-Backus | 13.0 |
| 117093 OA Cartilage Rep7 | 8.4 |
| 112672 OA Bone5 | 31.6 |
| 112673 OA Synovium5 | 15.7 |
| 112674 OA Synovial Fluid cells5 | 15.1 |
| 117100 OA Cartilage Rep14 | 2.3 |
| 112756 OA Bone9 | 100.0 |
| 112757 OA Synovium9 | 0.6 |
| 112758 OA Synovial Fluid Cells9 | 1.9 |
| 117125 RA Cartilage Rep2 | 1.3 |
| 113492 Bone2 RA | 4.2 |
| 113493 Synovium2 RA | 2.0 |
| 113494 Syn Fluid Cells RA | 5.5 |
| 113499 Cartilage4 RA | 4.3 |
| 113500 Bone4 RA | 9.5 |
| 113501 Synovium4 RA | 6.1 |
| 113502 Syn Fluid Cells4 RA | 3.7 |
| 113495 Cartilage3 RA | 3.9 |
| 113496 Bone3 RA | 7.4 |
| 113497 Synovium3 RA | 2.4 |
| 113498 Syn Fluid Cells3 RA | 3.3 |
| 117106 Normal Cartilage Rep20 | 1.8 |
| 113663 Bone3 Normal | 0.8 |
| 113664 Synovium3 Normal | 0.1 |
| 113665 Syn Fluid Cells3 Normal | 0.2 |
| 117107 Normal Cartilage Rep22 | 1.2 |
| 113667 Bone4 Normal | 8.1 |
| 113668 Synovium4 Normal | 6.0 |
| 113669 Syn Fluid Cells4 Normal | 17.0 |

Column A - Rel. Ex. (%) Ag3626, Run 234222205

[0513] TABLE HC
Ardais Colon1.0

| Tissue Name | A |
|---|---|
| 95318 colon (CHTN20435) | 19.9 |
| 95319 colon NAT (CHTN20435) | 0.3 |
| 95325 colon NAT (CHTN20473) | 0.4 |
| 97743 Colon cancer (CHTN20803) | 0.4 |
| 97745 Colon NAT (CHTN20867) | 1.0 |
| 97759 Colon cancer (OD06064) | 10.6 |
| 97760 Colon NAT (OD06064) | 0.3 |
| 98861 Colon cancer (OD06297-04) | 33.0 |
| 98862 Colon NAT (OD06297-015) | 0.7 |
| 98940 Colon malignant cancer (OD06205C) | 14.3 |
| 98941 Colon normal adjacent tissue (OD06205K) | 0.4 |
| 106291 colon adenocarcinoma (OD06787-02B) | 70.7 |
| 106292 colon NAT (OD06787-06F) | 0.8 |
| 106293 colon adenocarcinoma (OD06801-05E) | 19.8 |
| 108831 Colon cancer (OD06877) | 1.9 |
| 108832 Colon NAT (OD06877) | 0.3 |
| 138067 Colon cancer(CHTN 23212) | 65.1 |
| 138079 Colon cancer(CHTN 23624) | 13.9 |
| 138080 Colon NAT(CHTN 23624) | 0.3 |
| 142327 Colon cancer(8A3) | 6.4 |
| 142330 Colon cancer(8A6) | 6.9 |
| 142331 Colon cancer(8A7) | 17.3 |
| 142332 Colon NAT(8A8) | 1.3 |
| 142333 Colon cancer(8A9) | 83.5 |
| 142334 Colon NAT(8AA) | 1.1 |
| 142335 Colon cancer(8AB) | 76.8 |
| 142336 Colon cancer(8AC) | 100.0 |
| 142337 Colon NAT(8AD) | 2.1 |
| 142338 Colon cancer(8AE) | 59.5 |
| 142339 Colon NAT(8AF) | 1.8 |
| 142340 Colon cancer(8B0) | 22.5 |
| 142341 Colon cancer(8B1) | 72.7 |
| 142344 Colon cancer(8B7) | 66.0 |
| 145860 Colon NAT(9F1) | 1.6 |
| 145861 Colon cancer(9F2) | 19.3 |
| 145862 Colon NAT(A1D) | 2.0 |
| 145863 Colon cancer(9DB) | 17.0 |
| 145864 Colon NAT(A15) | 1.3 |
| 145865 Colon cancer(A14) | 49.3 |
| 145866 Colon NAT(9CC) | 1.5 |
| 145867 Colon cancer(9B9) | 74.7 |
| 148367 Colon Cancer(8677) | 11.5 |
| 148368 Colon NAT(8677) | 0.3 |
| 148372 Colon NAT(8842) | 0.2 |
| 148373 Colon Cancer(8869) | 27.4 |
| 148374 Colon NAT(8869) | 0.7 |
| 148375 Colon Cancer(8908) | 4.3 |
| 148376 Colon NAT(8908) | 0.2 |
| 148377 Colon Cancer(8688) | 9.0 |
| 148378 Colon NAT(8688) | 0.3 |
| 148379 Colon Cancer(8747) | 3.0 |
| 149748 Colon cancer(AC0) | 81.2 |
| 149752 Colon cancer(AC1) | 97.3 |
| 149754 Colon cancer(AC3) | 25.5 |
| 153791 Colon cancer(CHTN203C096) | 21.2 |
| 153792 Colon NAT(CHTN203C097) | 0.5 |
| 153797 Colon NAT(CHTN24753) | 2.9 |
| 154975 Colon NAT Pool | 0.5 |
| 152266 SW620 | 11.9 |
| 152297 47.HCT-116 | 1.8 |
| 155776 HT-29 | 55.5 |
| 155782 16. DLD-2 | 62.4 |
| 172030 Normal colon | 0.2 |

Column A - Rel. Exp. (%) Ag3626, Run 428498605

[0514] TABLE HD
Panel 4.1D

| Tissue Name | A |
|---|---|
| Secondary Th1 act | 0.4 |
| Secondary Th2 act | 0.1 |
| Secondary Tr1 act | 0.3 |
| Secondary Th1 rest | 0.0 |
| Secondary Th2 rest | 0.6 |
| Secondary Tr1 rest | 0.2 |
| Primary Th1 act | 0.3 |
| Primary Th2 act | 0.6 |
| Primary Tr1 act | 0.6 |
| Primary Th1 rest | 0.2 |
| Primary Th2 rest | 0.2 |
| Primary Tr1 rest | 0.3 |
| CD45RA CD4 lymphocyte act | 29.1 |
| CD45RO CD4 lymphocyte act | 0.3 |
| CD8 lymphocyte act | 0.1 |
| Secondary CD8 lymphocyte rest | 0.2 |
| Secondary CD8 lymphocyte act | 0.6 |
| CD4 lymphocyte none | 0.3 |
| 2ry Th1/Th2/Tr1 anti-CD95 CH11 | 0.5 |
| LAK cells rest | 0.7 |
| LAK cells IL-2 | 0.4 |
| LAK cells IL-2 + IL-12 | 0.0 |
| LAK cells IL-2 + IFN gamma | 0.6 |
| LAK cells IL-2 + IL-18 | 0.2 |
| LAK cells PMA/ionomycin | 0.3 |
| NK Cells IL-2 rest | 0.6 |
| Two Way MLR 3 day | 1.4 |
| Two Way MLR 5 day | 0.6 |
| Two Way MLR 7 day | 0.4 |
| PBMC rest | 0.2 |
| PBMC PWM | 5.1 |
| PBMC PHA-L | 8.3 |
| Ramos (B cell) none | 0.3 |
| Ramos (B cell) ionomycin | 0.8 |
| B lymphocytes PWM | 0.4 |
| B lymphocytes CD40L and IL-4 | 0.9 |
| EOL-1 dbcAMP | 0.1 |
| EOL-1 dbcAMP PMA/ionomycin | 0.6 |
| Dendritic cells none | 0.3 |
| Dendritic cells LPS | 0.2 |
| Dendritic cells anti-CD40 | 0.8 |
| Monocytes rest | 0.9 |
| Monocytes LPS | 40.6 |
| Macrophages rest | 0.1 |
| Macrophages LPS | 0.5 |
| HUVEC none | 0.4 |
| HUVEC starved | 0.1 |
| HUVEC IL-1beta | 0.2 |
| HUVEC IFN gamma | 0.2 |
| HUVEC TNF alpha + IFN gamma | 0.2 |
| HUVEC TNF alpha + IL4 | 0.1 |
| HUVEC IL-11 | 0.2 |
| Lung Microvascular EC none | 0.7 |
| Lung Microvascular EC TNFalpha + IL-1beta | 1.2 |
| Microvascular Dermal EC none | 0.1 |
| Microsvasular Dermal EC TNFalpha + IL-1beta | 0.7 |
| Bronchial epithelium TNFalpha + IL1beta | 0.5 |
| Small airway epithelium none | 1.1 |
| Small airway epithelium TNFalpha + IL-1beta | 1.1 |
| Coronery artery SMC rest | 28.5 |
| Coronery artery SMC TNFalpha + IL-1beta | 19.9 |
| Astrocytes rest | 61.6 |
| Astrocytes TNFalpha + IL-1beta | 100.0 |
| KU-812 (Basophil) rest | 0.3 |
| KU-812 (Basophil) PMA/ionomycin | 0.3 |
| CCD1106 (Keratinocytes) none | 0.6 |
| CCD1106 (Keratinocytes) TNFalpha + IL-1beta | 0.9 |
| Liver cirrhosis | 0.4 |
| NCI-H292 none | 9.5 |
| NCI-H292 IL-4 | 5.5 |
| NCI-H292 IL-9 | 4.2 |
| NCI-H292 IL-13 | 2.5 |
| NCI-H292 IFN gamma | 1.2 |
| HPAEC none | 0.1 |
| HPAEC TNF alpha + IL-1 beta | 2.2 |
| Lung fibroblast none | 75.8 |
| Lung fibroblast TNF alpha + IL-1 beta | 11.1 |
| Lung fibroblast IL-4 | 53.6 |
| Lung fibroblast IL-9 | 27.2 |
| Lung fibroblast IL-13 | 34.2 |
| Lung fibroblast IFN gamma | 20.4 |
| Dermal fibroblast CCD1070 rest | 99.3 |
| Dermal fibroblast CCD1070 TNF alpha | 64.6 |
| Dermal fibroblast CCD1070 IL-1 beta | 64.2 |
| Dermal fibroblast IFN gamma | 3.3 |
| Dermal fibroblast IL-4 | 1.4 |
| Dermal Fibroblasts rest | 66.9 |
| Neutrophils TNFa + LPS | 0.1 |
| Neutrophils rest | 0.0 |
| Colon | 0.1 |
| Lung | 8.8 |
| Thymus | 1.2 |
| Kidney | 0.3 |

Column A - Rel. Exp. (%) Ag3626, Run 169946026

[0515] TABLE HE
general oncology screening panel v 2.4

| Tissue Name | A |
|---|---|
| Colon cancer 1 | 30.6 |
| Colon NAT 1 | 0.8 |
| Colon cancer 2 | 19.9 |
| Colon NAT 2 | 0.6 |
| Colon cancer 3 | 100.0 |
| Colon NAT 3 | 1.1 |
| Colon malignant cancer 4 | 79.0 |
| Colon NAT 4 | 0.3 |
| Lung cancer 1 | 15.8 |
| Lung NAT 1 | 0.9 |
| Lung cancer 2 | 11.0 |
| Lung NAT 2 | 0.7 |
| Squamous cell carcinoma 3 | 21.3 |
| Lung NAT 3 | 0.2 |
| Metastatic melanoma 1 | 0.4 |
| Melanoma 2 | 0.5 |
| Melanoma 3 | 0.2 |
| Metastatic melanoma 4 | 8.0 |
| Metastatic melanoma 5 | 13.1 |
| Bladder cancer 1 | 0.6 |
| Bladder NAT 1 | 0.0 |
| Bladder cancer 2 | 0.2 |
| Bladder NAT 2 | 0.1 |
| Bladder NAT 3 | 0.0 |
| Bladder NAT 4 | 0.1 |
| Prostate adenocarcinoma 1 | 0.8 |
| Prostate adenocarcinoma 2 | 0.3 |
| Prostate adenocarcinoma 3 | 0.8 |
| Prostate adenocarcinoma 4 | 42.9 |
| Prostate NAT 5 | 0.0 |
| Prostate adenocarcinoma 6 | 0.1 |
| Prostate adenocarcinoma 7 | 0.5 |
| Prostate adenocarcinoma 8 | 0.0 |
| Prostate adenocarcinoma 9 | 2.6 |
| Prostate NAT 10 | 0.3 |
| Kidney cancer 1 | 1.1 |
| Kidney NAT 1 | 1.3 |
| Kidney cancer 2 | 4.1 |
| Kidney NAT 2 | 1.2 |
| Kidney cancer 3 | 2.1 |
| Kidney NAT 3 | 0.8 |
| Kidney cancer 4 | 0.7 |
| Kidney NAT 4 | 0.5 |

Column A - Rel. Exp. (%) Ag366, Run 260268656

[0516] Al_comprehensive panelv1.0 Summary: Ag3626 Transcript expression was higher in some joint tissues isolated from osteoarthritic (OA) patients as compared to normal joint tissues, with highest expression in an OA bone sample (CT=28.5). The gene's expression is useful in differentiating OA joint tissue from normal joint tissue. The transscript or the protein it encodes can be used as a marker for osteoarthritic tissues. Therapeutic modulation of this gene, expressed protein and/or use of antibodies or small molecule drugs targeting the gene or gene product are useful in the treatment of arthritis.

[0517] Ardais Colon 1.0 Summary: Ag3626 This gene was highly expressed in a colon cancer as compared to their normal adjacent tissue (NAT) counterparts. The gene's expression is useful in differentiating colon cancer tissue from normal colon tissue. Therapeutic modulation of this gene, expressed protein and/or use of antibodies or small molecule drugs targeting the gene or gene product are useful in the treatment of colon cancer.

[0518] Panel 4.1 D Summary: Ag3626 Highest gene expression was seen in TNF-alpha and IL-1 beta treated astrocytes (CT=26). Therapeutic modulation of this gene and/or use of antibodies or small molecule drugs targeting the gene or gene product are useful in the treatment of inflammatory CNS diseases such as multiple sclerosis. This gene was expressed in certain samples from lung and dermal fibroblasts. Therapeutic modulation of this gene and/or use of antibodies or small molecule drugs targeting the gene or gene product are useful in the treatment of lung inflammatory diseases such as asthma, and chronic obstructive pulmonary diseases, inflammatory skin diseases such as psoriasis, atopic dermatitis, ulcerative dermatitis, ulcerative colitis.

[0519] general oncology screening panel_V_{—}2.4 Summary: Ag3626 This gene was overexpressed in 4 out of 4 colon cancer and 3 out of 3 lung cancer samples as compared to Normal Adjacent Tissues (NATs). This gene was also expressed in melanoma, prostate adenocarcinoma and kidney cancer samples. The Gene expression is useful in differentiating skin, colon, lung, prostate and kidney cancerous tissues from normal counterparts. Therapeutic modulation of this gene and/or use of antibodies or small molecule drugs targeting the gene or gene product are useful in the treatment of cancers of the colon, lung, skin, prostate and kidney.

[0520] I. NOV12, CG88912-O₂: BETA-NEOENDORPHIN-DYNORPHIN PRECURSOR.

[0521] Expression of gene CG88912-02 was assessed using the primer-probe set Ag7210, described in Table IA. Results of the RTQ-PCR runs are shown in Table IB.

TABLE IA
Probe Name Ag7210

| | | | Start | SEQ |
|---|---|---|---|---|
| Primers | Sequences | Length | Position | ID No |
| Forward | 5′-cctgaaggagctgaacga | 20 | 282 | 182 |
| | tg-3′ | | | |
| Probe | TET-5′-ccatggagactggc | 26 | 305 | 183 |
| | acactctatctc-3′-TAMRA | | | |
| Reverse | 5′-tagcgtttgacctgctcc | 20 | 346 | 184 |
| | tt-3′ | | | |

[0522] TABLE IB
General screening panel v1.7

| Tissue Name | A |
|---|---|
| Adipose | 0.0 |
| HUVEC | 0.0 |
| Melanoma* Hs688(A).T | 0.0 |
| Melanoma* Hs688(B).T | 0.0 |
| Melanoma (met) SK-MEL-5 | 0.0 |
| Testis | 0.1 |
| Prostate ca. (bone met) PC-3 | 0.0 |
| Prostate ca. DU145 | 0.0 |
| Prostate pool | 0.0 |
| Uterus pool | 0.0 |
| Ovarian ca. OVCAR-3 | 0.0 |
| Ovarian ca. (ascites) SK-OV-3 | 0.0 |
| Ovarian ca. OVCAR-4 | 0.0 |
| Ovarian ca. OVCAR-5 | 0.0 |
| Ovarian ca. IGROV-1 | 100.0 |
| Ovarian ca. OVCAR-8 | 0.0 |
| Ovary | 0.0 |
| Breast ca. MCF-7 | 0.0 |
| Breast ca. MDA-MB-231 | 0.0 |
| Breast ca. BT 549 | 0.0 |
| Breast ca. T47D | 0.0 |
| 113452 mammary gland | 0.0 |
| Trachea | 0.0 |
| Lung | 0.0 |
| Fetal Lung | 0.0 |
| Lung ca. NCI-N417 | 0.0 |
| Lung ca. LX-1 | 0.0 |
| Lung ca. NCI-H146 | 0.0 |
| Lung ca. SHP-77 | 0.0 |
| Lung ca. NCI-H23 | 0.0 |
| Lung ca. NCI-H460 | 0.0 |
| Lung ca. HOP-62 | 0.0 |
| Lung ca. NCI-H522 | 0.0 |
| Lung ca. DMS-114 | 0.0 |
| Liver | 0.0 |
| Fetal Liver | 0.0 |
| Kidney pool | 0.0 |
| Fetal Kidney | 0.0 |
| Renal ca. 786-0 | 0.0 |
| Renal ca. A498 | 0.0 |
| Renal ca. ACHN | 0.0 |
| Renal ca. UO-31 | 0.0 |
| Renal ca. TK-10 | 0.0 |
| Bladder | 0.0 |
| Gastric ca. (liver met.) NCI-N87 | 0.0 |
| Stomach | 0.0 |
| Colon ca. SW-948 | 0.0 |
| Colon ca. SW480 | 0.0 |
| Colon ca. (SW480 met) SW620 | 0.0 |
| Colon ca. HT29 | 0.0 |
| Colon ca. HCT-116 | 0.0 |
| Colon cancer tissue | 0.0 |
| Colon ca. SW1116 | 0.0 |
| Colon ca. Colo-205 | 0.0 |
| Colon ca. SW-48 | 0.0 |
| Colon | 0.0 |
| Small Intestine | 0.0 |
| Fetal Heart | 0.0 |
| Heart | 0.0 |
| Lymph Node Pool | 0.0 |
| Lymph Node pool 2 | 0.0 |
| Fetal Skeletal Muscle | 0.0 |
| Skeletal Muscle pool | 0.0 |
| Skeletal Muscle | 0.0 |
| Spleen | 0.0 |
| Thymus | 0.0 |
| CNS cancer (glio/astro) SF-268 | 0.0 |
| CNS cancer (glio/astro) T98G | 0.0 |
| CNS cancer (neuro; met) SK-N-AS | 0.0 |
| CNS cancer (astro) SF-539 | 0.0 |
| CNS cancer (astro) SNB-75 | 0.0 |
| CNS cancer (glio) SNB-19 | 0.0 |
| CNS cancer (glio) SF-295 | 0.0 |
| Brain (Amygdala) | 0.7 |
| Brain (Cerebellum) | 0.0 |
| Brain (Fetal) | 0.3 |
| Brain (Hippocampus) | 0.6 |
| Cerebral Cortex pool | 0.1 |
| Brain (Substantia nigra) | 0.1 |
| Brain (Thalamus) | 0.4 |
| Brain (Whole) | 0.6 |
| Spinal Cord | 0.1 |
| Adrenal Gland | 0.0 |
| Pituitary Gland | 24.7 |
| Salivary Gland | 0.0 |
| Thyroid | 0.0 |
| Pancreatic ca. PANC-1 | 0.0 |
| Pancreas pool | 0.0 |

Column A - Rel. Ex. (%) Ag7210, Run 318040771

[0523] General_screening_panel_v1.7 Summary: Ag7210 The highest gene expression was detected in ovarian cancer cell line IGROV-1 (CT=23). Gene expression was detected in testis and brain. The gene's expression is useful in differentiating brain and testicular tissues from the other tissues represented on this panel. Therapeutic modulation of this gene, expressed protein and/or use of antibodies or small molecule drugs targeting the gene or gene product are useful in the treatment of disorders of the central nervous system including Alzheimer's disease, Parkinson's disease, trauma, stroke, epilepsy, pain, multiple sclerosis, schizophrenia, bipolar disorder, depression, autism, drug and alcohol addiction.

### Example D

### Gene Expression Analysis Using CuraChip in Human Tissues

[0524] Background: CuraGen has developed a gene microarray (CuraChip 1.2) for target identification. It provides a high-throughput means of global mRNA expression analyses of CuraGen's collection of cDNA sequences representing the Pharmaceutically Tractable Genome (PTG). This sequence set includes genes which can be developed into protein therapeutics, or used to develop antibody or small molecule therapeutics. CuraChip 1.2 contains ˜11,000 oligos representing approximately 8,500 gene loci, including (but not restricted to) kinases, ion channels, G-protein coupled receptors (GPCRs), nuclear hormone receptors, proteases, transporters, metabolic enzymes, hormones, growth factors, chemokines, cytokines, complement and coagulation factors, and cell surface receptors.

[0525] The CuraChip cDNAs were represented as 30-mer oligodeoxyribonucleotides (oligos) on a glass microchip. Hybridization methods using the longer CuraChip oligos are more specific compared to methods using 25-mer oligos. CuraChip oligos were synthesized with a linker, purified to remove truncated oligos (which can influence hybridization strength and specificity), and spotted on a glass slide. Oligo-dT primers were used to generate cRNA probes for hybridization from samples of interest. A biotin-avidin conjugation system was used to detect hybridized probes with a fluorophore-labeled secondary antibody. Gene expression was analyzed using clustering and correlation bioinformatics tools such as Spotfire® (Spotfire, Inc., 212 Elm Street, Somerville, Mass. 02144) and statistical tools such as multivariate analysis (MVA).

[0526] A number of control spots are present on CuraChip 1.2 for efficiency calculations and to provide alternative normalization methods. For example, CuraChip 1.2 contains a number of empty or negative control spots, as well as positive control spots containing a dilution series of oligos that detect the highly-expressed genes Ubiquitin and glyceraldehyde-3-phosphate dehydrogenase (GAPD). An analysis of spot signal level was performed using raw data from 67 hybridizations using all oligos. The maximum signal intensity for each oligo across all 67 hybridizations was determined, and the fold-over-background for this maximum signal was calculated (i.e. if the background reading is 20 and the raw spot intensity is 100, then the fold-over-background for that spot is 5×). The negative control or empty spots do occasionally “fire” or give a signal over the background level; however, they do not fire very strongly, with 77.1% of empty spots firing <3×over background and 91.7%<5×. The positive control spots (Ubiquitin and GAPD) always fired at >100×background. The experimental oligos (CuraOligos) fired over the entire range of intensities, with some at low fold-over-background intensities. Since the negative control spots do fire occasionally at low levels, we have set a suggested threshhold for data analysis at >5×background.

[0527] Approximately 561 samples of RNA from tissues obtained from surgically dissected diseased- and non-diseased tissues, and treated and untreated cell lines, were used to generate labelled nucleic acid which was hybridized to PTG Chip 1.2. Oligonucleotides corresponding to specific genes under investigation were used to determine gene expression profile.

[0528] I. Expression analysis of NOV2 CG124800-02: Oligonucleotide (optg2_{—}0013773, TAAAGGTCTCCACAGAGTTTATGCCATATT) (SEQ ID NO: 185) corresponding to CG124800-02 was used to determine specific gene expression on PTG Chip 1.2. Elevated levels of gene expression were detected in Alzheimer's disease and colon cancer samples as compared to the normal samples (Table DI). The gene's expression is useful for differentiating Alzheimer's disease brain tissue and colon cancer tissue from normal brain and normal colon, respectively. Therapeutic modulation of this gene, expressed protein and/or use of antibodies or small molecule drugs targeting the gene or gene product would be useful in the treatment of Alzheimer's disease and colon cancer.

TABLE DI
CG124800-02

| | Level of expression |
|---|---|
| G1C4D21B11-39_Alzheier's disease B4951 | 1431.15 |
| G1C4D21B11-40_Alzheimer's disease B4953 | 959.87 |
| G1C4D21B11-41_Alzheimer's disease B5018 | 1123.4 |
| G1C4D21B11-43_Alzheimer's disease B5019 | 935.43 |
| G1C4D21B11-44_Alzheimer's disease B5086 | 851.64 |
| G1C4D21B11-51_Alzheimer's disease B5096 | 852.47 |
| G1C4D21B11-52_Alzheimer's disease B5098 | 1354.42 |
| G1C4D21B11-54_Alzheimer's disease B5129 | 1515.67 |
| G1C4D21B11-55_Alzheimer's disease B5210 | 369.98 |
| G1C4D21B11-56_Control B4810 | 627.86 |
| G1C4D21B11-57_Control B4825 | 212.3 |
| G1C4D21B11-58_Control B4930 | 676.9 |
| G1C4D21B11-59_Control B4932 | 131.09 |
| G1C4D21B11-60_Control B5024 | 96.44 |
| G1C4D21B11-61_Control B5113 | 651.75 |
| G1C4D21B11-62_Control B5140 | 1305.36 |
| G1C4D21B11-63_Control B5190 | 422.09 |
| G1C4D21B11-64_Control B5220 | 126.97 |
| G1C4D21B11-65_Control B5245 | 516.33 |
| G1C4E19B13-12_Colon NAT(9F1) | 433.47 |
| G1C4E19B13-13_Colon cancer(9F2) | 572.44 |
| G1C4E19B13-14_Colon NAT(A1D) | 306.05 |
| G1C4E19B13-15_Colon cancer(9DB) | 6278.14 |
| G1C4E19B13-16_Colon NAT(A15) | 305.91 |
| G1C4E19B13-17_Colon cancer(A14) | 1554.8 |
| G1C4E19B13-18_Colon NAT(ACB) | 272.53 |
| G1C4E19B13-19_Colon cancer(AC0) | 657.42 |
| G1C4E19B13-2_Colon cancer(8A4) | 762.73 |
| G1C4E19B13-20_Colon NAT(ACD) | 416.35 |
| G1C4E19B13-21_Colon cancer(AC4) | 514.59 |
| G1C4E19B13-22_Colon NAT(AC2) | 171.76 |
| G1C4E19B13-23_Colon cancer(AC1) | 1090.92 |
| G1C4E19B13-24_Colon NAT(ACC) | 330.16 |
| G1C4E19B13-25_Colon cancer(AC3) | 468.83 |

[0529] II. Expression analysis of NOV4 CG186317-02: Oligonucleotide (optg2_{—}1203115, ATGCTGTGMCGAGTGTGATATTACTGMT) (SEQ ID NO: 186) corresponding to CG186317-02 was used to determine specific gene expression on PTG Chip 1.2. Significant gene expression was detected in brain. Reduced expression was seen in Alzheimer's disease samples and in amygdala and anterior cingulate from clinically depressed patients as compared to the normal samples (Table DII). Gene expression is useful in differentiating Alzheimer's disease and depressed amygdala and anterior cingulate samples from normal brain samples. Therapeutic modulation of this gene, expressed protein and/or use of antibodies or small molecule drugs targeting the gene or gene product would be useful in the treatment of central nervous system disorders such as Alzheimer's disease and depression.

TABLE DII
CG186317-02

| | Level of expression |
|---|---|
| G1C4D21B11-39_Alzheimer's disease B4951 | 77.45 |
| G1C4D21B11-40_Alzheimer's disease B4953 | 199.38 |
| G1C4D21B11-41_Alzheimer's disease B5018 | 39.53 |
| G1C4D21B11-43_Alzheimer's disease B5019 | 16.78 |
| G1C4D21B11-44_Alzheimer's disease B5086 | 117.75 |
| G1C4D21B11-51_Alzheimer's disease B5096 | 94.01 |
| G1C4D21B11-52_Alzheimer's disease B5098 | 104.19 |
| G1C4D21B11-54_Alzheimer's disease B5129 | 43.82 |
| G1C4D21B11-55_Alzheimer's disease B5210 | 134.3 |
| G1C4D21B11-56_Control B4810 | 266.49 |
| G1C4D21B11-57_Control B4825 | 320.93 |
| G1C4D21B11-58_Control B4930 | 60.34 |
| G1C4D21B11-59_Control B4932 | 495.27 |
| G1C4D21B11-60_Control B5024 | 429.83 |
| G1C4D21B11-61_Control B5113 | 140.35 |
| G1C4D21B11-62_Control B5140 | 101.42 |
| G1C4D21B11-63_Control B5190 | 104.48 |
| G1C4D21B11-64_Control B5220 | 348.21 |
| G1C4D21B11-65_Control B5245 | 227.33 |
| G1C4E21B14-62_Schizophrenia thalamus 477 | 93.13 |
| G1C4E21B14-63_Schizophrenia thalamus 532 | 255.67 |
| G1C4E21B14-64_Schizophrenia thalamus 683 | 188.96 |
| G1C4E21B14-65_Schizophrenia thalamus 544 | 51.59 |
| G1C4E21B14-66_Schizophrenia thalamus 1671 | 0 |
| G1C4E21B14-67_Schizophrenia thalamus 1737 | 0 |
| G1C4E21B14-68_Schizophrenia thalamus 2464 | 184.62 |
| G1C4E21B14-69_Schizophrenia thalamus 2586 | 62.52 |
| G1C4E23B15-1_Depression amygdala 600 | 81.27 |
| G1C4E23B15-10_Depression amygdala 759 | 143.59 |
| G1C4E23B15-11_Depression anterior cingulate 759 | 144.24 |
| G1C4E23B15-12_Control amygdala 552 | 233.29 |
| G1C4E23B15-14_Control anterior cingulate 482 | 378.72 |
| G1C4E23B15-15_Depression anterior cingulate 721 | 129.64 |
| G1C4E23B15-16_Control amygdala 3175 | 522.18 |
| G1C4E23B15-17_Depression anterior cingulate 600 | 175.33 |
| G1C4E23B15-18_Depression anterior cingulate 588 | 135.98 |
| G1C4E23B15-19_Control anterior cingulate 3175 | 408.96 |
| G1C4E23B15-2_Control anterior cingulate 606 | 563.12 |
| G1C4E23B15-20_Depression anterior cingulate 567 | 158.03 |

G1 C4E23B15-21_Depression Amygdala 588 132.49

[0531] III. Expression analysis of NOV5, CG192920-01: Oligonucleotide (optg2_{—}1201806, ACTTATAGCGTTTCCTCCTCGAAATTCTAC) (SEQ ID NO: 187) corresponding to CG192920-01 was used to determine specific gene expression on PTG Chip 1.2. Reduced gene expression was detected in colon cancer samples as compared to the normal adjacent tissue (NAT) (Table DII). Gene expression is useful in differentiating colon cancer from normal colon tissue. Therapeutic modulation of this gene, expressed protein and/or use of antibodies or small molecule drugs targeting the gene or gene product would be useful in the treatment of colon cancer.

TABLE DIII
CG192920-01

| | Level of expression |
|---|---|
| G1C4E19B13-10_Colon NT(8B6) | 561.84 |
| G1C4E19B13-12_Colon NAT(9F1) | 461.6 |
| G1C4E19B13-13_Colon cancer(9F2) | 280 |
| G1C4E19B13-14_Colon NAT(A1D) | 182.05 |
| G1C4E19B13-15_Colon cancer(9DB) | 194.77 |
| G1C4E19B13-16_Colon NAT(A15) | 164.03 |
| G1C4E19B13-17_Colon cancer(A14) | 343.44 |
| G1C4E19B13-18_Colon NAT(ACB) | 267.87 |
| G1C4E19B13-19_Colon cancer(AC0) | 139.31 |
| G1C4E19B13-2_Colon cancer(8A4) | 159.57 |
| G1C4E19B13-20_Colon NAT(ACD) | 477.22 |
| G1C4E19B13-21_Colon cancer(AC4) | 141.46 |
| G1C4E19B13-22_Colon NAT(AC2) | 272.11 |
| G1C4E19B13-23_Colon cancer(AC1) | 124.75 |

### Other Embodiments

[0532] Although particular embodiments are disclosed herein in detail, this is done by way of example for purposes of illustration only, and is not intended to be limiting with respect to the scope of the appended claims, which follow. In particular, it is contemplated by the inventors that various substitutions, alterations, and modifications will be made to the invention without departing from the spirit and scope of the invention as defined by the claims. The choice of nucleic acid starting material, clone of interest, or library type is believed to be a matter of routine for a person of ordinary skill in the art with knowledge of the embodiments described herein. Other aspects, advantages, and modifications considered to be within the scope of the following claims. The claims presented are representative of the inventions disclosed herein. Other, unclaimed inventions are also contemplated. Applicants reserve the right to pursue such inventions in later claims.

The application's sequence listing, which the Patent Office published only in electronic form, follows.

SEQUENCE LISTING (187 sequences)

SEQ ID NO: 1 - DNA, 2383 bp, Homo sapiens
  CDS (17)..(2383)
caccaagcttcccaccatgcggctgctgctggccctgttgggggtcctgctgagtgtgcctgggcctccagtctcgtccctggaggcctctgaggaagtggagcttgagccctgcctggctcccagcctggagcagcaagagcaggagctgacagtagcccttgggcagcctgtgcggctgtgctgtgggcgggctgagcgtggtggccactggtacaaggagggcagtcgcctggcacctgctggccgtgtacggggctggaggggccgcctagagattgccagcttcctacctgaggatgctggccgctacctctgcccggcacgaggctccatgatcgtcctgcagaatctcaccttgattacaggtgactccttgacctccagcaacgatgatgaggaccccgagtcccatagggacctctcgaataggcacagttacccccagcaagcaccctactggacacacccccagcgcatggagaagaaactgcatgcagtacctgcggggaacaccgtcaagttccgctgtccagctgcaggcaaccccacgcccaccatccgctggcttaaggatggacaggcctttcatggggagaaccgcattggaggcattcggctgcgccatcagcactggagtctcgtgatggagagcgtggtgccctcggaccgcggcacatacacctgcctggtagagaacgctgtgggcagcatccgttataactacctgctagatgtgctggagcggtccccgcaccggcccatcctgcaggccgggctcccggccaacaccacagccgtggtgggcagcgacgtggagctgctgtgcaaggtgtacagcgatgcccagccccacatccagtggctgaagcacatcgtcatcaacggcagcagcttcggagccgacggtttcccctatgtgcaagtcctaaagactgcagacatcaatagctcagaggtggaggtcctgtacctgcggaacgtgtcagccgaggacgcaggcgagtacacctgcctcgcaggcaattccatcggcctctcctaccagtctgcctggctcacggtgctgccagtgcgagggcagaggaggaccccacatggaccgcagcagcgcccgaggccaggtatacggacatcatcctgtacgcgtcgggctccctggccttggctgtgctcctgctgctggccgggctgtatcgagggcaggcgctccacggccggcacccccgcccgcccgccactgtgcagaagctctcccgcttccctctggcccgacagttctccctggagtcaggctcttccggcaagtcaagctcatccctggtacgaggcgtgcgtctctcctccagcggccccgccttgctcgccggcctcgctggtgcttgggaagcccctaggcgagggctgctttggccaggtagtacgtgcagaggcctttggcatggaccctgcccggcctgaccaagccagcactgtggccgtcaagatgctcaaagacaacgcctctgacaaggacctggccgacctggtctcggagatggaggtgatgaagctgatcggccgacacaagaacatcatcaacctgcttggtgtctgcacccaggaagggcccctgtacgtgatcgtggagtgcgccgccaagggaaacctgcgggagttcctgcgggcccggcgccccccaggccccgacctcagccccgacggtcctcggagcagtgaggggccgctctccttcccagtcctggtctcctgcgcctaccaggtggcccgaggcatgcagtatctggagtcccggaagtgtatccaccgggacctggctgcccgcaatgtgctggtgactgaggacaatgtgatgaagattgctgactttgggctggcccgcggcgtccaccacattgactactataagaaaaccagcaacggccgcctgcctgtgaagtggatggcgcccgaggccttgtttgaccgggtgtacacacaccagagtgacgtgtggtcttttgggatcccgctatgggagatcttcaccctcgggggctccccgtatcctggcatcccggtggaggagctgttctcgctgctgcgggagggacatcggatggaccgacccccacactgccccccagagctgtacgggctgatgcgtgagtgctggcacgcagcgccctcccagaggcctaccttcaagcagctggtggaggcgctggacaaggtcctgctggccgtctctgaggagtacctcgacctccgcctgaccttcggaccctattccccctctggtggggacgccagcagcacctgctcctccagcgattctgtcttcagccacgaccccctgccattgggatccagctccttccccttcgggtctggggtgcagaca

SEQ ID NO: 2 - protein, 789 aa, Homo sapiens
MRLLLALLGVLLSVPGPPVSSLEASEEVELEPCLAPSLEQQEQELTVALGQPVRLCCGRAERGGHWYKEGSRLAPAGRVRGWRGRLEIASFLPEDAGRYLCPARGSMIVLQNLTLITGDSLTSSNDDEDPESHRDLSNRHSYPQQAPYWTHPQRMEKKLHAVPAGNTVKFRCPAAGNPTPTIRWLKDGQAFHGENRIGGIRLRHQHWSLVMESVVPSDRGTYTCLVENAVGSIRYNYLLDVLERSPHRPILQAGLPANTTAVVGSDVELLCKVYSDAQPHIQWLKHIVINGSSFGADGFPYVQVLKTADINSSEVEVLYLRNVSAEDAGEYTCLAGNSIGLSYQSAWLTVLPVRGQRRTPHGPQQRPRPGIRTSSCTRRAPWPWLCSCCWPGCIEGRRSTAGTPARPPLCRSSPASLWPDSSPWSQALPASQAHPWYEACVSPPAAPPCSPASLVLGKPLGEGCFGQVVRAEAFGMDPARPDQASTVAVKMLKDNASDKDLADLVSEMEVMKLIGRHKNIINLLGVCTQEGPLYVIVECAAKGNLREFLRARRPPGPDLSPDGPRSSEGPLSFPVLVSCAYQVARGMQYLESRKCIHRDLAARNVLVTEDNVMKIADFGLARGVHHIDYYKKTSNGRLPVKWMAPEALFDRVYTHQSDVWSFGIPLWEIFTLGGSPYPGIPVEELFSLLREGHRMDRPPHCPPELYGLMRECWHAAPSQRPTFKQLVEALDKVLLAVSEEYLDLRLTFGPYSPSGGDASSTCSSSDSVFSHDPLPLGSSSFPFGSGVQT

SEQ ID NO: 3 - DNA, 2383 bp, Homo sapiens
  CDS (17)..(2383)
caccaagcttcccaccatgcggctgctgctggccctgttgggggtcctgctgagtgtgcctgggcctccagtctcgtccctggaggcctctgaggaagtggagcttgagccctgcctggctcccagcctggagcagcaagagcaggagctgacagtagcccttgggcagcctgtgcggctgtgctgtgggcgggctgagcgtggtggccactggtacaaggagggcagtcgcctggcacctgctggccgtgtacggggctggaggggccgcctagagattgccagcttcctacctgaggatgctggccgctacctctgcccggcacgaggctccatgatcgtcctgcagaatctcaccttgattacaggtgactccttgacctccagcaacgatgatgaggaccccgagtcccatagggacctctcgaataggcacagttacccccagcaagcaccctactggacacacccccagcgcatggagaagaaactgcatgcagtacctgcggggaacaccgtcaagttccgctgtccagctgcaggcaaccccacgcccaccatccgctggcttaaggatggacaggcctttcatggggagaaccgcattggaggcattcggctgcgccatcagcactggagtctcgtgatggagagcgtggtgccctcggaccgcggcacatacacctgcctggtagagaacgctgtgggcagcatccgttataactacctgctagatgtgctggagcggtccccgcaccggcccatcctgcaggccgggctcccggccaacaccacagccgtggtgggcagcgacgtggagctgctgtgcaaggtgtacagcgatgcccagccccacatccagtggctgaagcacatcgtcatcaacggcagcagcttcggagccgacggtttcccctatgtgcaagtcctaaagactgcagacatcaatagctcagaggtggaggtcctgtacctgcggaacgtgtcagccgaggacgcaggcgagtacacctgcctcgcaggcaattccatcggcctctcctaccagtctgcctggctcacggtgctgccagtgcgagggcagaggaggaccccacatggaccgcagcagcgcccgaggccaggtatacggacatcatcctgtacgcgtcgggctccctggccttggctgtgctcctgctgctggccgggctgtatcgagggcaggcgctccacggccggcacccccgcccgcccgccactgtgcagaagctctcccgcttccctctggcccgacagttctccctggagtcaggctcttccggcaagtcaagctcatccctggtacgaggcgtgcgtctctcctccagcggccccgccttgctcgccggcctcgctggtgcttgggaagcccctaggcgagggctgctttggccaggtagtacgtgcagaggcctttggcgtggaccctgcccggcctgaccaagccagcactgtggccgtcaagatgctcaaagacaacgcctctgacaaggacctggccgacctggtctcggagatggaggtgatgaagctgatcggccgacacaagaacatcatcaacctgcttggtgtctgcacccaggaagggcccctgtacgtgatcgtggagtgcgccgccaagggaaacctgcgggagttcctgcgggcccggcgccccccaggccccgacctcagccccgacggtcctcggagcagtgaggggccgctctccttcccagtcctggtctcctgcgcctaccaggtggcccgaggcatgcagtatctggagtcccggaagtgtatccaccgggacctggctgcccgcaatgtgctggtgactgaggacaatgtgatgaagattgctgactttgggctggcccgcggcgtccaccacattgactactataagaaaaccagcaacggccgcctgcctgtgaagtggatggcgcccgaggccttgtttgaccgggtgtacacacaccagagtgacgtgtggtcttttgggatcccgctatgggagatcttcaccctcgggggctccccgtatcctggcatcccggtggaggagctgttctcgctgctgcgggagggacatcggatggaccgacccccacactgccccccagagctgtacgggctgatgcgtgagtgctggcacgcagcgccctcccagaggcctaccttcaagcagctggtggaggcgctggacaaggtcctgctggccgtctctgaggagtacctcgacctccgcctgaccttcggaccctattccccctctggtggggacgccagcagcacctgctcctccagcgattctgtcttcagccacgaccccctgccattgggatccagctccttccccttcgggtctggggtgcagaca

SEQ ID NO: 4 - protein, 789 aa, Homo sapiens
MRLLLALLGVLLSVPGPPVSSLEASEEVELEPCLAPSLEQQEQELTVALGQPVRLCCGRAERGGHWYKEGSRLAPAGRVRGWRGRLEIASFLPEDAGRYLCPARGSMIVLQNLTLITGDSLTSSNDDEDPESHRDLSNRHSYPQQAPYWTHPQRMEKKLHAVPAGNTVKFRCPAAGNPTPTIRWLKDGQAFHGENRIGGIRLRHQHWSLVMESVVPSDRGTYTCLVENAVGSIRYNYLLDVLERSPHRPILQAGLPANTTAVVGSDVELLCKVYSDAQPHIQWLKHIVINGSSFGADGFPYVQVLKTADINSSEVEVLYLRNVSAEDAGEYTCLAGNSIGLSYQSAWLTVLPVRGQRRTPHGPQQRPRPGIRTSSCTRRAPWPWLCSCCWPGCIEGRRSTAGTPARPPLCRSSPASLWPDSSPWSQALPASQAHPWYEACVSPPAAPPCSPASLVLGKPLGEGCFGQVVRAEAFGVDPARPDQASTVAVKMLKDNASDKDLADLVSEMEVMKLIGRHKNIINLLGVCTQEGPLYVIVECAAKGNLREFLRARRPPGPDLSPDGPRSSEGPLSFPVLVSCAYQVARGMQYLESRKCIHRDLAARNVLVTEDNVMKIADFGLARGVHHIDYYKKTSNGRLPVKWMAPEALFDRVYTHQSDVWSFGIPLWEIFTLGGSPYPGIPVEELFSLLREGHRMDRPPHCPPELYGLMRECWHAAPSQRPTFKQLVEALDKVLLAVSEEYLDLRLTFGPYSPSGGDASSTCSSSDSVFSHDPLPLGSSSFPFGSGVQT

SEQ ID NO: 5 - DNA, 2383 bp, Homo sapiens
  CDS (17)..(2383)
caccaagcttcccaccatgcggctgctgctggccctgttgggggtcctgctgagtgtgcctgggcctccagtctcgtccctggaggcctctgaggaagtggagcttgagccctgcctggctcccagcctggagcagcaagagcaggagctgacagtagcccttgggcagcctgtgcggctgtgctgtgggcgggctgagcgtggtggccactggtacaaggagggcagtcgcctggcacctgctggccgtgtacggggctggaggggccgcctagagattgccagcttcctacctgaggatgctggccgctacctctgcccggcacgaggctccatgatcgtcctgcagaatctcaccttgattacaggtgactccttgacctccagcaacgatgatgaggaccccgagtcccatagggacctctcgaataggcacagttacccccagcaagcaccctactggacacacccccagcgcatggagaagaaactgcatgcagtacctgcggggaacaccgtcaagttccgctgtccagctgcaggcaaccccacgcccaccatccgctggcttaaggatggacaggcctttcatggggagaaccgcattggaggcattcggctgcgccatcagcactggagtctcgtgatggagagcgtggtgccctcggaccgcggcacatacacctgcctggtagagaacgctgtgggcagcatccgttataactacctgctagatgtgctggagcggtccccgcaccggcccatcctgcaggccgggctcccggccaacaccacagccgtggtgggcagcgacgtggagctgctgtgcaaggtgtacagcgatgcccagccccacatccagtggctgaagcgcatcgtcatcaacggcagcagcttcggagccgacggtttcccctatgtgcaagtcctaaagactgcagacatcaatagctcagaggtggaggtcctgtacctgcggaacgtgtcagccgaggacgcaggcgagtacacctgcctcgcaggcaattccatcggcctctcctaccagtctgcctggctcacggtgctgccagtgcgagggcagaggaggaccccacatggaccgcagcagcgcccgaggccaggtatacggacatcatcctgtacgcgtcgggctccctggccttggctgtgctcctgctgctggccgggctgtatcgagggcaggcgctccacggccggcacccccgcccgcccgccactgtgcagaagctctcccgcttccctctggcccgacagttctccctggagtcaggctcttccggcaagtcaagctcatccctggtacgaggcgtgcgtctctcctccagcggccccgccttgctcgccggcctcgctggtgcttgggaagcccctaggcgagggctgctttggccaggtagtacgtgcagaggcctttggcatggaccctgcccggcctgaccaagccagcactgtggccgtcaagatgctcaaagacaacgcctctgacaaggacctggccgacctggtctcggagatggaggtgatgaagctgatcggccgacacaagaacatcatcaacctgcttggtgtctgcacccaggaagggcccctgtacgtgatcgtggagtgcgccgccaagggaaacctgcgggagttcctgcgggcccggcgccccccaggccccgacctcagccccgacggtcctcggagcagtgaggggccgctctccttcccagtcctggtctcctgcgcctaccaggtggcccgaggcatgcagtatctggagtcccggaagtgtatccaccgggacctggctgcccgcaatgtgctggtgactgaggacaatgtgatgaagattgctgactttgggctggcccgcggcgtccaccacattgactactataagaaaaccagcaacggccgcctgcctgtgaagtggatggcgcccgaggccttgtttgaccgggtgtacacacaccagagtgacgtgtggtcttttgggatcccgctatgggagatcttcaccctcgggggctccccgtatcctggcatcccggtggaggagctgttctcgctgctgcgggagggacatcggatggaccgacccccacactgccccccagagctgtacgggctgatgcgtgagtgctggcacgcagcgccctcccagaggcctaccttcaagcagctggtggaggcgctggacaaggtcctgctggccgtctctgaggagtacctcgacctccgcctgaccttcggaccctattccccctctggtggggacgccagcagcacctgctcctccagcgattctgtcttcagccacgaccccctgccattgggatccagctccttccccttcgggtctggggtgcagaca

SEQ ID NO: 6 - protein, 789 aa, Homo sapiens
MRLLLALLGVLLSVPGPPVSSLEASEEVELEPCLAPSLEQQEQELTVALGQPVRLCCGRAERGGHWYKEGSRLAPAGRVRGWRGRLEIASFLPEDAGRYLCPARGSMIVLQNLTLITGDSLTSSNDDEDPESHRDLSNRHSYPQQAPYWTHPQRMEKKLHAVPAGNTVKFRCPAAGNPTPTIRWLKDGQAFHGENRIGGIRLRHQHWSLVMESVVPSDRGTYTCLVENAVGSIRYNYLLDVLERSPHRPILQAGLPANTTAVVGSDVELLCKVYSDAQPHIQWLKRIVINGSSFGADGFPYVQVLKTADINSSEVEVLYLRNVSAEDAGEYTCLAGNSIGLSYQSAWLTVLPVRGQRRTPHGPQQRPRPGIRTSSCTRRAPWPWLCSCCWPGCIEGRRSTAGTPARPPLCRSSPASLWPDSSPWSQALPASQAHPWYEACVSPPAAPPCSPASLVLGKPLGEGCFGQVVRAEAFGMDPARPDQASTVAVKMLKDNASDKDLADLVSEMEVMKLIGRHKNIINLLGVCTQEGPLYVIVECAAKGNLREFLRARRPPGPDLSPDGPRSSEGPLSFPVLVSCAYQVARGMQYLESRKCIHRDLAARNVLVTEDNVMKIADFGLARGVHHIDYYKKTSNGRLPVKWMAPEALFDRVYTHQSDVWSFGIPLWEIFTLGGSPYPGIPVEELFSLLREGHRMDRPPHCPPELYGLMRECWHAAPSQRPTFKQLVEALDKVLLAVSEEYLDLRLTFGPYSPSGGDASSTCSSSDSVFSHDPLPLGSSSFPFGSGVQT

SEQ ID NO: 7 - DNA, 2383 bp, Homo sapiens
  CDS (17)..(2383)
caccaagcttcccaccatgcggctgctgctggccctgttgggggtcctgctgagtgtgcctgggcctccagtctcgtccctggaggcctctgaggaagtggagcttgagccctgcctggctcccagcctggagcagcaagagcaggagctgacagtagcccttgggcagcctgtgcggctgtgctgtgggcgggctgagcgtggtggccactggtacaaggagggcagtcgcctggcacctgctggccgtgtacggggctggaggggccgcctagagattgccagcttcctacctgaggatgctggccgctacctctgcccggcacgaggctccatgatcgtcctgcagaatctcaccttgattacaggtgactccttgacctccagcaacgatgatgaggaccccgagtcccatagggacctctcgaataggcacagttacccccagcaagcaccctactggacacacccccagcgcatggagaagaaactgcatgcagtacctgcggggaacaccgtcaagttccgctgtccagctgcaggcaaccccacgcccaccatccgctggcttaaggatggacaggcctttcatggggagaaccgcattggaggcattcggctgcgccatcagcactggagtctcgtgatggagagcgtggtgccctcggaccgcggcacatacacctgcctggtagagaacgctgtgggcagcatccgttataactacctgctagatgtgctggagcggtccccgcaccggcccatcctgcaggccgggctcccggccaacaccacagccgtggtgggcagcgacgtggagctgctgtgcaaggtgtacagcgatgcccagccccacatccagcggctgaagcacatcgtcatcaacggcagcagcttcggagccgacggtttcccctatgtgcaagtcctaaagactgcagacatcaatagctcagaggtggaggtcctgtacctgcggaacgtgtcagccgaggacgcaggcgagtacacctgcctcgcaggcaattccatcggcctctcctaccagtctgcctggctcacggtgctgccagtgcgagggcagaggaggaccccacatggaccgcagcagcgcccgaggccaggtatacggacatcatcctgtacgcgtcgggctccctggccttggctgtgctcctgctgctggccgggctgtatcgagggcaggcgctccacggccggcacccccgcccgcccgccactgtgcagaagctctcccgcttccctctggcccgacagttctccctggagtcaggctcttccggcaagtcaagctcatccctggtacgaggcgtgcgtctctcctccagcggccccgccttgctcgccggcctcgctggtgcttgggaagcccctaggcgagggctgctttggccaggtagtacgtgcagaggcctttggcatggaccctgcccggcctgaccaagccagcactgtggccgtcaagatgctcaaagacaacgcctctgacaaggacctggccgacctggtctcggagatggaggtgatgaagctgatcggccgacacaagaacatcatcaacctgcttggtgtctgcacccaggaagggcccctgtacgtgatcgtggagtgcgccgccaagggaaacctgcgggagttcctgcgggcccggcgccccccaggccccgacctcagccccgacggtcctcggagcagtgaggggccgctctccttcccagtcctggtctcctgcgcctaccaggtggcccgaggcatgcagtatctggagtcccggaagtgtatccaccgggacctggctgcccgcaatgtgctggtgactgaggacaatgtgatgaagattgctgactttgggctggcccgcggcgtccaccacattgactactataagaaaaccagcaacggccgcctgcctgtgaagtggatggcgcccgaggccttgtttgaccgggtgtacacacaccagagtgacgtgtggtcttttgggatcccgctatgggagatcttcaccctcgggggctccccgtatcctggcatcccggtggaggagctgttctcgctgctgcgggagggacatcggatggaccgacccccacactgccccccagagctgtacgggctgatgcgtgagtgctggcacgcagcgccctcccagaggcctaccttcaagcagctggtggaggcgctggacaaggtcctgctggccgtctctgaggagtacctcgacctccgcctgaccttcggaccctattccccctctggtggggacgccagcagcacctgctcctccagcgattctgtcttcagccacgaccccctgccattgggatccagctccttccccttcgggtctggggtgcagaca

SEQ ID NO: 8 - protein, 789 aa, Homo sapiens
MRLLLALLGVLLSVPGPPVSSLEASEEVELEPCLAPSLEQQEQELTVALGQPVRLCCGRAERGGHWYKEGSRLAPAGRVRGWRGRLEIASFLPEDAGRYLCPARGSMIVLQNLTLITGDSLTSSNDDEDPESHRDLSNRHSYPQQAPYWTHPQRMEKKLHAVPAGNTVKFRCPAAGNPTPTIRWLKDGQAFHGENRIGGIRLRHQHWSLVMESVVPSDRGTYTCLVENAVGSIRYNYLLDVLERSPHRPILQAGLPANTTAVVGSDVELLCKVYSDAQPHIQRLKHIVINGSSFGADGFPYVQVLKTADINSSEVEVLYLRNVSAEDAGEYTCLAGNSIGLSYQSAWLTVLPVRGQRRTPHGPQQRPRPGIRTSSCTRRAPWPWLCSCCWPGCIEGRRSTAGTPARPPLCRSSPASLWPDSSPWSQALPASQAHPWYEACVSPPAAPPCSPASLVLGKPLGEGCFGQVVRAEAFGMDPARPDQASTVAVKMLKDNASDKDLADLVSEMEVMKLIGRHKNIINLLGVCTQEGPLYVIVECAAKGNLREFLRARRPPGPDLSPDGPRSSEGPLSFPVLVSCAYQVARGMQYLESRKCIHRDLAARNVLVTEDNVMKIADFGLARGVHHIDYYKKTSNGRLPVKWMAPEALFDRVYTHQSDVWSFGIPLWEIFTLGGSPYPGIPVEELFSLLREGHRMDRPPHCPPELYGLMRECWHAAPSQRPTFKQLVEALDKVLLAVSEEYLDLRLTFGPYSPSGGDASSTCSSSDSVFSHDPLPLGSSSFPFGSGVQT

SEQ ID NO: 9 - DNA, 2383 bp, Homo sapiens
  CDS (17)..(2383)
caccaagcttcccaccatgcggctgctgctggccctgttgggggtcctgctgagtgtgcctgggcctccagtctcgtccctggaggcctctgaggaagtggagcttgagccctgcctggctcccagcctggagcagcaagagcaggagctgacagtagcccttgggcagcctgtgcggctgtgctgtgggcgggctgagcgtggtggccactggtacaaggagggcagtcgcctggcacctgctggccgtgtacggggctggaggggccgcctagagattgccagcttcctacctgaggatgctggccgctacctctgcccggcacgaggctccatgatcgtcctgcagaatctcaccttgattacaggtgactccttgacctccagcaacgatgatgaggaccccgagtcccatagggacctctcgaataggcacagttacccccagcaagcaccctactggacacacccccagcgcatggagaagaaactgcatgcagtacctgcggggaacaccgtcaagttccgctgtccagctgcaggcaaccccacgcccaccatccgctggcttaaggatggacaggcctttcatggggagaaccgcattggaggcattcggctgcgccatcagcactggagtctcgtgatggagagcgtggtgccctcggaccgcggcacatacacctgcctggtagagaacgctgtgggcagcatccgttataactacctgctagatgtgctggagcggtccccgcaccggcccatcctgcaggccgggctcccggccaacaccacagccgtggtgggcagcgacgtggagctgctgtgcaaggtgtacagcgatgcccagccccacatccagtggctgaagcacatcgtcatcaacggcagcagcttcggagccgacggtttcccctatgtgcaagtcctaaagactgcagacatcaatagctcagaggtggaggtcctgtacctgcggaacgtgtcagccgaggacgcaggcgagtacacctgcctcgcaggcaattccatcggcctctcctaccagtctgcctggctcacggtgctgccagtgcgagggcagaggaggaccccacatggaccgcagcagcgcccgaggccaggtatacggacatcatcctgtacgcgtcgggctccctggccttggctgtgctcctgctgctggccgggctgtatcgagggcaggcgctccacggccggcacccccgcccgcccgccactgtgcagaagctctcccgctcccctctggcccgacagttctccctggagtcaggctcttccggcaagtcaagctcatccctggtacgaggcgtgcgtctctcctccagcggccccgccttgctcgccggcctcgctggtgcttgggaagcccctaggcgagggctgctttggccaggtagtacgtgcagaggcctttggcatggaccctgcccggcctgaccaagccagcactgtggccgtcaagatgctcaaagacaacgcctctgacaaggacctggccgacctggtctcggagatggaggtgatgaagctgatcggccgacacaagaacatcatcaacctgcttggtgtctgcacccaggaagggcccctgtacgtgatcgtggagtgcgccgccaagggaaacctgcgggagttcctgcgggcccggcgccccccaggccccgacctcagccccgacggtcctcggagcagtgaggggccgctctccttcccagtcctggtctcctgcgcctaccaggtggcccgaggcatgcagtatctggagtcccggaagtgtatccaccgggacctggctgcccgcaatgtgctggtgactgaggacaatgtgatgaagattgctgactttgggctggcccgcggcgtccaccacattgactactataagaaaaccagcaacggccgcctgcctgtgaagtggatggcgcccgaggccttgtttgaccgggtgtacacacaccagagtgacgtgtggtcttttgggatcccgctatgggagatcttcaccctcgggggctccccgtatcctggcatcccggtggaggagctgttctcgctgctgcgggagggacatcggatggaccgacccccacactgccccccagagctgtacgggctgatgcgtgagtgctggcacgcagcgccctcccagaggcctaccttcaagcagctggtggaggcgctggacaaggtcctgctggccgtctctgaggagtacctcgacctccgcctgaccttcggaccctattccccctctggtggggacgccagcagcacctgctcctccagcgattctgtcttcagccacgaccccctgccattgggatccagctccttccccttcgggtctggggtgcagaca

SEQ ID NO: 10 - protein, 789 aa, Homo sapiens
MRLLLALLGVLLSVPGPPVSSLEASEEVELEPCLAPSLEQQEQELTVALGQPVRLCCGRAERGGHWYKEGSRLAPAGRVRGWRGRLEIASFLPEDAGRYLCPARGSMIVLQNLTLITGDSLTSSNDDEDPESHRDLSNRHSYPQQAPYWTHPQRMEKKLHAVPAGNTVKFRCPAAGNPTPTIRWLKDGQAFHGENRIGGIRLRHQHWSLVMESVVPSDRGTYTCLVENAVGSIRYNYLLDVLERSPHRPILQAGLPANTTAVVGSDVELLCKVYSDAQPHIQWLKHIVINGSSFGADGFPYVQVLKTADINSSEVEVLYLRNVSAEDAGEYTCLAGNSIGLSYQSAWLTVLPVRGQRRTPHGPQQRPRPGIRTSSCTRRAPWPWLCSCCWPGCIEGRRSTAGTPARPPLCRSSPAPLWPDSSPWSQALPASQAHPWYEACVSPPAAPPCSPASLVLGKPLGEGCFGQVVRAEAFGMDPARPDQASTVAVKMLKDNASDKDLADLVSEMEVMKLIGRHKNIINLLGVCTQEGPLYVIVECAAKGNLREFLRARRPPGPDLSPDGPRSSEGPLSFPVLVSCAYQVARGMQYLESRKCIHRDLAARNVLVTEDNVMKIADFGLARGVHHIDYYKKTSNGRLPVKWMAPEALFDRVYTHQSDVWSFGIPLWEIFTLGGSPYPGIPVEELFSLLREGHRMDRPPHCPPELYGLMRECWHAAPSQRPTFKQLVEALDKVLLAVSEEYLDLRLTFGPYSPSGGDASSTCSSSDSVFSHDPLPLGSSSFPFGSGVQT

SEQ ID NO: 11 - DNA, 2383 bp, Homo sapiens
  CDS (17)..(2383)
caccaagcttcccaccatgcggctgctgctggccctgttgggggtcctgctgagtgtgcctgggcctccagtctcgtccctggaggcctctgaggaagtggagcttgagccccgcctggctcccagcctggagcagcaagagcaggagctgacagtagcccttgggcagcctgtgcggctgtgctgtgggcgggctgagcgtggtggccactggtacaaggagggcagtcgcctggcacctgctggccgtgtacggggctggaggggccgcctagagattgccagcttcctacctgaggatgctggccgctacctctgcccggcacgaggctccatgatcgtcctgcagaatctcaccttgattacaggtgactccttgacctccagcaacgatgatgaggaccccgagtcccatagggacctctcgaataggcacagttacccccagcaagcaccctactggacacacccccagcgcatggagaagaaactgcatgcagtacctgcggggaacaccgtcaagttccgctgtccagctgcaggcaaccccacgcccaccatccgctggcttaaggatggacaggcctttcatggggagaaccgcattggaggcattcggctgcgccatcagcactggagtctcgtgatggagagcgtggtgccctcggaccgcggcacatacacctgcctggtagagaacgctgtgggcagcatccgttataactacctgctagatgtgctggagcggtccccgcaccggcccatcctgcaggccgggctcccggccaacaccacagccgtggtgggcagcgacgtggagctgctgtgcaaggtgtacagcgatgcccagccccacatccagtggctgaagcacatcgtcatcaacggcagcagcttcggagccgacggtttcccctatgtgcaagtcctaaagactgcagacatcaatagctcagaggtggaggtcctgtacctgcggaacgtgtcagccgaggacgcaggcgagtacacctgcctcgcaggcaattccatcggcctctcctaccagtctgcctggctcacggtgctgccagtgcgagggcagaggaggaccccacatggaccgcagcagcgcccgaggccaggtatacggacatcatcctgtacgcgtcgggctccctggccttggctgtgctcctgctgctggccgggctgtatcgagggcaggcgctccacggccggcacccccgcccgcccgccactgtgcagaagctctcccgcttccctctggcccgacagttctccctggagtcaggctcttccggcaagtcaagctcatccctggtacgaggcgtgcgtctctcctccagcggccccgccttgctcgccggcctcgctggtgcttgggaagcccctaggcgagggctgctttggccaggtagtacgtgcagaggcctttggcatggaccctgcccggcctgaccaagccagcactgtggccgtcaagatgctcaaagacaacgcctctgacaaggacctggccgacctggtctcggagatggaggtgatgaagctgatcggccgacacaagaacatcatcaacctgcttggtgtctgcacccaggaagggcccctgtacgtgatcgtggagtgcgccgccaagggaaacctgcgggagttcctgcgggcccggcgccccccaggccccgacctcagccccgacggtcctcggagcagtgaggggccgctctccttcccagtcctggtctcctgcgcctaccaggtggcccgaggcatgcagtatctggagtcccggaagtgtatccaccgggacctggctgcccgcaatgtgctggtgactgaggacaatgtgatgaagattgctgactttgggctggcccgcggcgtccaccacattgactactataagaaaaccagcaacggccgcctgcctgtgaagtggatggcgcccgaggccttgtttgaccgggtgtacacacaccagagtgacgtgtggtcttttgggatcccgctatgggagatcttcaccctcgggggctccccgtatcctggcatcccggtggaggagctgttctcgctgctgcgggagggacatcggatggaccgacccccacactgccccccagagctgtacgggctgatgcgtgagtgctggcacgcagcgccctcccagaggcctaccttcaagcagctggtggaggcgctggacaaggtcctgctggccgtctctgaggagtacctcgacctccgcctgaccttcggaccctattccccctctggtggggacgccagcagcacctgctcctccagcgattctgtcttcagccacgaccccctgccattgggatccagctccttccccttcgggtctggggtgcagaca

SEQ ID NO: 12 - protein, 789 aa, Homo sapiens
MRLLLALLGVLLSVPGPPVSSLEASEEVELEPRLAPSLEQQEQELTVALGQPVRLCCGRAERGGHWYKEGSRLAPAGRVRGWRGRLEIASFLPEDAGRYLCPARGSMIVLQNLTLITGDSLTSSNDDEDPESHRDLSNRHSYPQQAPYWTHPQRMEKKLHAVPAGNTVKFRCPAAGNPTPTIRWLKDGQAFHGENRIGGIRLRHQHWSLVMESVVPSDRGTYTCLVENAVGSIRYNYLLDVLERSPHRPILQAGLPANTTAVVGSDVELLCKVYSDAQPHIQWLKHIVINGSSFGADGFPYVQVLKTADINSSEVEVLYLRNVSAEDAGEYTCLAGNSIGLSYQSAWLTVLPVRGQRRTPHGPQQRPRPGIRTSSCTRRAPWPWLCSCCWPGCIEGRRSTAGTPARPPLCRSSPASLWPDSSPWSQALPASQAHPWYEACVSPPAAPPCSPASLVLGKPLGEGCFGQVVRAEAFGMDPARPDQASTVAVKMLKDNASDKDLADLVSEMEVMKLIGRHKNIINLLGVCTQEGPLYVIVECAAKGNLREFLRARRPPGPDLSPDGPRSSEGPLSFPVLVSCAYQVARGMQYLESRKCIHRDLAARNVLVTEDNVMKIADFGLARGVHHIDYYKKTSNGRLPVKWMAPEALFDRVYTHQSDVWSFGIPLWEIFTLGGSPYPGIPVEELFSLLREGHRMDRPPHCPPELYGLMRECWHAAPSQRPTFKQLVEALDKVLLAVSEEYLDLRLTFGPYSPSGGDASSTCSSSDSVFSHDPLPLGSSSFPFGSGVQT

SEQ ID NO: 13 - DNA, 2383 bp, Homo sapiens
  CDS (17)..(2383)
caccaagcttcccaccatgcggctgctgctggccctgttgggggtcctgctgagtgtgcctgggcctccagtctcgtccctggaggcctctgaggaagtggagcttgagccctgcctggctcccagcctggagcagcaagagcaggagctgacagtagcccttgggcagcctgtgcggctgtgctgtgggcgggctgagcgtggtggccactggtacaaggagggcagtcgcctgacacctgctggccgtgtacggggctggaggggccgcctagagattgccagcttcctacctgaggatgctggccgctacctctgcccggcacgaggctccatgatcgtcctgcagaatctcaccttgattacaggtgactccttgacctccagcaacgatgatgaggaccccgagtcccatagggacctctcgaataggcacagttacccccagcaagcaccctactggacacacccccagcgcatggagaagaaactgcatgcagtacctgcggggaacaccgtcaagttccgctgtccagctgcaggcaaccccacgcccaccatccgctggcttaaggatggacaggcctttcatggggagaaccgcattggaggcattcggctgcgccatcagcactggagtctcgtgatggagagcgtggtgccctcggaccgcggcacatacacctgcctggtagagaacgctgtgggcagcatccgttataactacctgctagatgtgctggagcggtccccgcaccggcccatcctgcaggccgggctcccggccaacaccacagccgtggtgggcagcgacgtggagctgctgtgcaaggtgtacagcgatgcccagccccacatccagtggctgaagcacatcgtcatcaacggcagcagcttcggagccgacggtttcccctatgtgcaagtcctaaagactgcagacatcaatagctcagaggtggaggtcctgtacctgcggaacgtgtcagccgaggacgcaggcgagtacacctgcctcgcaggcaattccatcggcctctcctaccagtctgcctggctcacggtgctgccagtgcgagggcagaggaggaccccacatggaccgcagcagcgcccgaggccaggtatacggacatcatcctgtacgcgtcgggctccctggccttggctgtgctcctgctgctggccgggctgtatcgagggcaggcgctccacggccggcacccccgcccgcccgccactgtgcagaagctctcccgcttccctctggcccgacagttctccctggagtcaggctcttccggcaagtcaagctcatccctggtacgaggcgtgcgtctctcctccagcggccccgccttgctcgccggcctcgctggtgcttgggaagcccctaggcgagggctgctttggccaggtagtacgtgcagaggcctttggcatggaccctgcccggcctgaccaagccagcactgtggccgtcaagatgctcaaagacaacgcctctgacaaggacctggccgacctggtctcggagatggaggtgatgaagctgatcggccgacacaagaacatcatcaacctgcttggtgtctgcacccaggaagggcccctgtacgtgatcgtggagtgcgccgccaagggaaacctgcgggagttcctgcgggcccggcgccccccaggccccgacctcagccccgacggtcctcggagcagtgaggggccgctctccttcccagtcctggtctcctgcgcctaccaggtggcccgaggcatgcagtatctggagtcccggaagtgtatccaccgggacctggctgcccgcaatgtgctggtgactgaggacaatgtgatgaagattgctgactttgggctggcccgcggcgtccaccacattgactactataagaaaaccagcaacggccgcctgcctgtgaagtggatggcgcccgaggccttgtttgaccgggtgtacacacaccagagtgacgtgtggtcttttgggatcccgctatgggagatcttcaccctcgggggctccccgtatcctggcatcccggtggaggagctgttctcgctgctgcgggagggacatcggatggaccgacccccacactgccccccagagctgtacgggctgatgcgtgagtgctggcacgcagcgccctcccagaggcctaccttcaagcagctggtggaggcgctggacaaggtcctgctggccgtctctgaggagtacctcgacctccgcctgaccttcggaccctattccccctctggtggggacgccagcagcacctgctcctccagcgattctgtcttcagccacgaccccctgccattgggatccagctccttccccttcgggtctggggtgcagaca

SEQ ID NO: 14 - protein, 789 aa, Homo sapiens
MRLLLALLGVLLSVPGPPVSSLEASEEVELEPCLAPSLEQQEQELTVALGQPVRLCCGRAERGGHWYKEGSRLTPAGRVRGWRGRLEIASFLPEDAGRYLCPARGSMIVLQNLTLITGDSLTSSNDDEDPESHRDLSNRHSYPQQAPYWTHPQRMEKKLHAVPAGNTVKFRCPAAGNPTPTIRWLKDGQAFHGENRIGGIRLRHQHWSLVMESVVPSDRGTYTCLVENAVGSIRYNYLLDVLERSPHRPILQAGLPANTTAVVGSDVELLCKVYSDAQPHIQWLKHIVINGSSFGADGFPYVQVLKTADINSSEVEVLYLRNVSAEDAGEYTCLAGNSIGLSYQSAWLTVLPVRGQRRTPHGPQQRPRPGIRTSSCTRRAPWPWLCSCCWPGCIEGRRSTAGTPARPPLCRSSPASLWPDSSPWSQALPASQAHPWYEACVSPPAAPPCSPASLVLGKPLGEGCFGQVVRAEAFGMDPARPDQASTVAVKMLKDNASDKDLADLVSEMEVMKLIGRHKNIINLLGVCTQEGPLYVIVECAAKGNLREFLRARRPPGPDLSPDGPRSSEGPLSFPVLVSCAYQVARGMQYLESRKCIHRDLAARNVLVTEDNVMKIADFGLARGVHHIDYYKKTSNGRLPVKWMAPEALFDRVYTHQSDVWSFGIPLWEIFTLGGSPYPGIPVEELFSLLREGHRMDRPPHCPPELYGLMRECWHAAPSQRPTFKQLVEALDKVLLAVSEEYLDLRLTFGPYSPSGGDASSTCSSSDSVFSHDPLPLGSSSFPFGSGVQT

SEQ ID NO: 15 - DNA, 2383 bp, Homo sapiens
  CDS (17)..(2383)
caccaagcttcccaccatgcggctgctgctggccctgttgggggtcctgctgagtgtgcctgggcctccagtctcgtccctggaggcctctgaggaagtggagcttgagccctgcctggctcccagcctggagcagcaagagcaggagctgacagtagcccttgggcagcctgtgcggctgtgctgtgggcgggctgagcgtggtggccactggtacaaggagggcagtcgcctggcacctgctggccgtgtacggggctggaggggccgcctagagattgccagcttcctacctgaggatgctggccgctacctctgcccggcacgaggctccatgatcgtcctgcagaatctcaccttgattacaggtgactccttgacctccagcaacgatgatgaggaccccgagtcccatagggacctctcgaataggcacagttacccccagcaagcaccctactggacacacccccagcgcatggagaagaaactgcatgcagtacctgcggggaacaccgtcaagttccgctgtccagctgcaggcaaccccacgcccaccatccgctggcttaaggatggacaggcctttcatggggagaaccgcattggaggcattcggctgcgccatcagcactggagtctcgtgatggagagcgtggtgccctcggaccgcggcacatacacctgcctggtagagaacgctgtgggcagcatccgttataactacctgctagatgtgctggagcggtccccgcaccggcccatcctgcaggccgggctcccggccaacaccacagccgtggtgggcagcgacgtggagctgctgtgcaaggtgtacagcgatgcccagccccacatccagtggctgaagcacatcgtcatcaacggcagcagcttcggagccgacggtttcccctatgtgcaagtcctaaagactgcagacatcaatagctcagaggtggaggtcctgtacctgcggaacgtgtcagccgaggacgcaggcgagtacacctgcctcgcaggcaattccatcggcctctcctaccagtctgcctggctcacggtgctgccagtgcgagggcagaggaggaccccacatggaccgcagcagcgcccgaggccaggtatacggacatcatcctgtacgcgtcgggctccctggccttggctgtgctcctgctgctggccgggctgtatcgagggcaggcgctccacggccggcacccccgcccgcccgccactgtgcagaagctctcccgcttccctctggcccgacagttctccctggagtcaggctcttccggcaagtcaagctcatccctggtacgaggcgtgcgtctctcctccagcggccccgccttgctcgccggcctcgctggtgcttgggaagcccctaggcgagggctgctttggccaggtagtacgtgcagaggcctttggcatggaccctgcccggcctgaccaagccagcactgtggccgtcaagatgctcaaagacaacgcctctgacaaggacctggccgacctggtctcggagatggaggtgatgaagctgatcggccgacacaagaacatcatcaacctgcttggtgtctgcacccaggaagggcccctgtacgtgatcgtggagtgcgccgccaagggaaacctgcgggagttcctgcgggcccggcgccccccaggccccgacctcagccccgacggtcctcggagcagtgaggggccgctctccttcccagtcctggtctcctgcgcctaccaggtggcccgaggcgtgcagtatctggagtcccggaagtgtatccaccgggacctggctgcccgcaatgtgctggtgactgaggacaatgtgatgaagattgctgactttgggctggcccgcggcgtccaccacattgactactataagaaaaccagcaacggccgcctgcctgtgaagtggatggcgcccgaggccttgtttgaccgggtgtacacacaccagagtgacgtgtggtcttttgggatcccgctatgggagatcttcaccctcgggggctccccgtatcctggcatcccggtggaggagctgttctcgctgctgcgggagggacatcggatggaccgacccccacactgccccccagagctgtacgggctgatgcgtgagtgctggcacgcagcgccctcccagaggcctaccttcaagcagctggtggaggcgctggacaaggtcctgctggccgtctctgaggagtacctcgacctccgcctgaccttcggaccctattccccctctggtggggacgccagcagcacctgctcctccagcgattctgtcttcagccacgaccccctgccattgggatccagctccttccccttcgggtctggggtgcagaca

SEQ ID NO: 16 - protein, 789 aa, Homo sapiens
MRLLLALLGVLLSVPGPPVSSLEASEEVELEPCLAPSLEQQEQELTVALGQPVRLCCGRAERGGHWYKEGSRLAPAGRVRGWRGRLEIASFLPEDAGRYLCPARGSMIVLQNLTLITGDSLTSSNDDEDPESHRDLSNRHSYPQQAPYWTHPQRMEKKLHAVPAGNTVKFRCPAAGNPTPTIRWLKDGQAFHGENRIGGIRLRHQHWSLVMESVVPSDRGTYTCLVENAVGSIRYNYLLDVLERSPHRPILQAGLPANTTAVVGSDVELLCKVYSDAQPHIQWLKHIVINGSSFGADGFPYVQVLKTADINSSEVEVLYLRNVSAEDAGEYTCLAGNSIGLSYQSAWLTVLPVRGQRRTPHGPQQRPRPGIRTSSCTRRAPWPWLCSCCWPGCIEGRRSTAGTPARPPLCRSSPASLWPDSSPWSQALPASQAHPWYEACVSPPAAPPCSPASLVLGKPLGEGCFGQVVRAEAFGMDPARPDQASTVAVKMLKDNASDKDLADLVSEMEVMKLIGRHKNIINLLGVCTQEGPLYVIVECAAKGNLREFLRARRPPGPDLSPDGPRSSEGPLSFPVLVSCAYQVARGVQYLESRKCIHRDLAARNVLVTEDNVMKIADFGLARGVHHIDYYKKTSNGRLPVKWMAPEALFDRVYTHQSDVWSFGIPLWEIFTLGGSPYPGIPVEELFSLLREGHRMDRPPHCPPELYGLMRECWHAAPSQRPTFKQLVEALDKVLLAVSEEYLDLRLTFGPYSPSGGDASSTCSSSDSVFSHDPLPLGSSSFPFGSGVQT

SEQ ID NO: 17 - DNA, 2392 bp, Homo sapiens
  CDS (17)..(2383)
caccaagcttcccaccatgcggctgctgctggccctgttgggggtcctgctgagtgtgcctgggcctccagtctcgtccctggaggcctctgaggaagtggagcttgagccctgcctggctcccagcctggagcagcaagagcaggagctgacagtagcccttgggcagcctgtgcggctgtgctgtgggcgggctgagcgtggtggccactggtacaaggagggcagtcgcctggcacctgctggccgtgtacggggctggaggggccgcctagagattgccagcttcctacctgaggatgctggccgctacctctgcccggcacgaggctccatgatcgtcctgcagaatctcaccttgattacaggtgactccttgacctccagcaacgatgatgaggaccccgagtcccatagggacctctcgaataggcacagttacccccagcaagcaccctactggacacacccccagcgcatggagaagaaactgcatgcagtacctgcggggaacaccgtcaagttccgctgtccagctgcaggcaaccccacgcccaccatccgctggcttaaggatggacaggcctttcatggggagaaccgcattggaggcattcggctgcgccatcagcactggagtctcgtgatggagagcgtggtgccctcggaccgcggcacatacacctgcctggtagagaacgctgtgggcagcatccgttataactacctgctagatgtgctggagcggtccccgcaccggcccatcctgcaggccgggctcccggccaacaccacagccgtggtgggcagcgacgtggagctgctgtgcaaggtgtacagcgatgcccagccccacatccagtggctgaagcacatcgtcatcaacggcagcagcttcggagccgacggtttcccctatgtgcaagtcctaaagactgcagacatcaatagctcagaggtggaggtcctgtacctgcggaacgtgtcagccgaggacgcaggcgagtacacctgcctcgcaggcaattccatcggcctctcctaccagtctgcctggctcacggtgctgccagtgcgagggcagaggaggaccccacatggaccgcagcagcgcccgaggccaggtatacggacatcatcctgtacgcgtcgggctccctggccttggctgtgctcctgctgctggccgggctgtatcgagggcaggcgctccacggccggcacccccgcccgcccgccactgtgcagaagctctcccgcttccctctggcccgacagttctccctggagtcaggctcttccggcaagtcaagctcatccctggtacgaggcgtgcgtctctcctccagcggccccgccttgctcgccggcctcgctggtgcttgggaagcccctaggcgagggctgctttggccaggtagtacgtgcagaggcctttggcatggaccctgcccggcctgaccaagccagcactgtggccgtcaagatgctcaaagacaacgcctctgacaaggacctggccgacctggtctcggagatggaggtgatgaagctgatcggccgacacaagaacatcatcaacctgcttggtgtctgcacccaggaagggcccctgtacgtgatcgtgaagtgcgccgccaagggaaacctgcgggagttcctgcgggcccggcgccccccaggccccgacctcagccccgacggtcctcggagcagtgaggggccgctctccttcccagtcctggtctcctgcgcctaccaggtggcccgaggcatgcagtatctggagtcccggaagtgtatccaccgggacctggctgcccgcaatgtgctggtgactgaggacaatgtgatgaagattgctgactttgggctggcccgcggcgtccaccacattgactactataagaaaaccagcaacggccgcctgcctgtgaagtggatggcgcccgaggccttgtttgaccgggtgtacacacaccagagtgacgtgtggtcttttgggatcccgctatgggagatcttcaccctcgggggctccccgtatcctggcatcccggtggaggagctgttctcgctgctgcgggagggacatcggatggaccgacccccacactgccccccagagctgtacgggctgatgcgtgagtgctggcacgcagcgccctcccagaggcctaccttcaagcagctggtggaggcgctggacaaggtcctgctggccgtctctgaggagtacctcgacctccgcctgaccttcggaccctattccccctctggtggggacgccagcagcacctgctcctccagcgattctgtcttcagccacgaccccctgccattgggatccagctccttccccttcgggtctggggtgcagacagtcgacggc

SEQ ID NO: 18 - protein, 789 aa, Homo sapiens
MRLLLALLGVLLSVPGPPVSSLEASEEVELEPCLAPSLEQQEQELTVALGQPVRLCCGRAERGGHWYKEGSRLAPAGRVRGWRGRLEIASFLPEDAGRYLCPARGSMIVLQNLTLITGDSLTSSNDDEDPESHRDLSNRHSYPQQAPYWTHPQRMEKKLHAVPAGNTVKFRCPAAGNPTPTIRWLKDGQAFHGENRIGGIRLRHQHWSLVMESVVPSDRGTYTCLVENAVGSIRYNYLLDVLERSPHRPILQAGLPANTTAVVGSDVELLCKVYSDAQPHIQWLKHIVINGSSFGADGFPYVQVLKTADINSSEVEVLYLRNVSAEDAGEYTCLAGNSIGLSYQSAWLTVLPVRGQRRTPHGPQQRPRPGIRTSSCTRRAPWPWLCSCCWPGCIEGRRSTAGTPARPPLCRSSPASLWPDSSPWSQALPASQAHPWYEACVSPPAAPPCSPASLVLGKPLGEGCFGQVVRAEAFGMDPARPDQASTVAVKMLKDNASDKDLADLVSEMEVMKLIGRHKNIINLLGVCTQEGPLYVIVKCAAKGNLREFLRARRPPGPDLSPDGPRSSEGPLSFPVLVSCAYQVARGMQYLESRKCIHRDLAARNVLVTEDNVMKIADFGLARGVHHIDYYKKTSNGRLPVKWMAPEALFDRVYTHQSDVWSFGIPLWEIFTLGGSPYPGIPVEELFSLLREGHRMDRPPHCPPELYGLMRECWHAAPSQRPTFKQLVEALDKVLLAVSEEYLDLRLTFGPYSPSGGDASSTCSSSDSVFSHDPLPLGSSSFPFGSGVQT

SEQ ID NO: 19 - DNA, 2383 bp, Homo sapiens
  CDS (17)..(2383)
caccaagcttcccaccatgcggctgctgctggccctgttgggggtcctgctgagtgtgcctgggcctccagtctcgtccctggaggcctctgaggaagtggagcttgagccctgcctggctcccagcctggagcagcaagagcaggagctgacagtagcccttgggcagcctgtgcggctgtgctgtgggcgggctgagcgtggtggccactggtacaaggagggcagtcgcctggcacctgctggccgtgtacggggctggaggggccgcctagagattgccagcttcctacctgaggatgctggccgctacctctgcccggcacgaggctccatgatcgtcctgcagaatctcaccttgattacaggtgactccttgacctccagcaacgatgatgaggaccccgagtcccatagggacctctcgaataggcacagttacccccagcaagcaccctactggacacacccccagcgcatggagaagaaactgcatgcagtacctgcggggaacaccgtcaagttccgctgtccagctgcaggcaaccccacgcccaccatccgctggcttaaggatggacaggcctttcatggggagaaccgcattggaggcattcggctgcgccatcagcactggagtctcgtgatggagagcgtggtgccctcggaccgcggcacatacacctgcctggtagagaacgctgtgggcagcatccgttataactacctgctagatgtgctggagcggtccccgcaccggcccatcctgcaggccgggctcccggccaacaccacagccgtggtgggcagcgacgtggagctgctgtgcaaggtgtacagcgatgcccagccccacatccagtggctgaagcacatcgtcatcaacggcagcagcttcggagccgacggtttcccctatgtgcaagtcctaaagactgcagacatcaatagctcagaggtggaggtcctgtacctgcggaacgtgtcagccgaggacgcaggcgagtacacctgcctcgcaggcaattccatcggcctctcctaccagtctgcctggctcacggtgctgccagtgcgagggcagaggaggaccccacatggaccgcagcagcgcccgaggccaggtatacggacatcatcctgtacgcgtcgggctccctggccttggctgtgctcctgctgctggccgggctgtatcgagggcaggcgctccacggccggcacccccgcccgcccgccactgtgcagaagctctcccgcttccctctggcccgacagttctccctggagtcaggctcttccggcaagtcaagctcatccctggtacgaggcgtgcgtctctcctccagcggccccgccttgctcgccggcctcgctggtgcttgggaagcccctaggcgagggctgctttggccaggtagtacgtgcagaggcctttggcatggaccctgcccggcctgaccaagccagcactgtggccgtcaagatgctcaaagacaacgcctctgacaaggacctggccgacctggtctcggagatggaggtgatgaagctgatcggccgacacaagaacatcatcaacctgcttggtgtctgcacccaggaagggcccctgtacgtgatcgcggagtgcgccgccaagggaaacctgcgggagttcctgcgggcccggcgccccccaggccccgacctcagccccgacggtcctcggagcagtgaggggccgctctccttcccagtcctggtctcctgcgcctaccaggtggcccgaggcatgcagtatctggagtcccggaagtgtatccaccgggacctggctgcccgcaatgtgctggtgactgaggacaatgtgatgaagattgctgactttgggctggcccgcggcgtccaccacattgactactataagaaaaccagcaacggccgcctgcctgtgaagtggatggcgcccgaggccttgtttgaccgggtgtacacacaccagagtgacgtgtggtcttttgggatcccgctatgggagatcttcaccctcgggggctccccgtatcctggcatcccggtggaggagctgttctcgctgctgcgggagggacatcggatggaccgacccccacactgccccccagagctgtacgggctgatgcgtgagtgctggcacgcagcgccctcccagaggcctaccttcaagcagctggtggaggcgctggacaaggtcctgctggccgtctctgaggagtacctcgacctccgcctgaccttcggaccctattccccctctggtggggacgccagcagcacctgctcctccagcgattctgtcttcagccacgaccccctgccattgggatccagctccttccccttcgggtctggggtgcagaca

SEQ ID NO: 20 - protein, 789 aa, Homo sapiens
MRLLLALLGVLLSVPGPPVSSLEASEEVELEPCLAPSLEQQEQELTVALGQPVRLCCGRAERGGHWYKEGSRLAPAGRVRGWRGRLEIASFLPEDAGRYLCPARGSMIVLQNLTLITGDSLTSSNDDEDPESHRDLSNRHSYPQQAPYWTHPQRMEKKLHAVPAGNTVKFRCPAAGNPTPTIRWLKDGQAFHGENRIGGIRLRHQHWSLVMESVVPSDRGTYTCLVENAVGSIRYNYLLDVLERSPHRPILQAGLPANTTAVVGSDVELLCKVYSDAQPHIQWLKHIVINGSSFGADGFPYVQVLKTADINSSEVEVLYLRNVSAEDAGEYTCLAGNSIGLSYQSAWLTVLPVRGQRRTPHGPQQRPRPGIRTSSCTRRAPWPWLCSCCWPGCIEGRRSTAGTPARPPLCRSSPASLWPDSSPWSQALPASQAHPWYEACVSPPAAPPCSPASLVLGKPLGEGCFGQVVRAEAFGMDPARPDQASTVAVKMLKDNASDKDLADLVSEMEVMKLIGRHKNIINLLGVCTQEGPLYVIAECAAKGNLREFLRARRPPGPDLSPDGPRSSEGPLSFPVLVSCAYQVARGMQYLESRKCIHRDLAARNVLVTEDNVMKIADFGLARGVHHIDYYKKTSNGRLPVKWMAPEALFDRVYTHQSDVWSFGIPLWEIFTLGGSPYPGIPVEELFSLLREGHRMDRPPHCPPELYGLMRECWHAAPSQRPTFKQLVEALDKVLLAVSEEYLDLRLTFGPYSPSGGDASSTCSSSDSVFSHDPLPLGSSSFPFGSGVQT

SEQ ID NO: 21 - DNA, 2383 bp, Homo sapiens
  CDS (17)..(2383)
caccaagcttcccaccatgcggctgctgctggccctgttgggggtcctgctgagtgtgcctgggcctccagtctcgtccctggaggcctctgaggaagtggagcttgagccctgcctggctcccagcctggagcagcaagagcaggagctgacagtagcccttgggcagcctgtgcggctgtgctgtgggcgggctgagcgtggtggccactggtacaaggagggcagtcgcctggcacctgctggccgtgtacggggctggaggggccgcctagagattgccagcttcctacctgaggatgctggccgctacctctgcccggcacgaggctccatgatcgtcctgcagaatctcaccttgattacaggtgactccttgacctccagcaacgatgatgaggaccccgagtcccatagggacctctcgaataggcacagttacccccagcaagcaccctactggacacacccccagcgcatggagaagaaactgcatgcagtacctgcggggaacaccgtcaagttccgctgtccagctgcaggcaaccccacgcccaccatccgctggcttaaggatggacaggcctttcatggggagaaccgcattggaggcattcggctgcgccatcagcactggagtctcgtgatggagagcgtggtgccctcggaccgcggcacatacacctgcctggtagagaacgctgtgggcagcatccgttataactacctgctagatgtgctggagcggtccccgcaccggcccatcctgcaggccgggctcccggccaacaccacagccgtggtgggcagcgacgtggagctgctgtgcaaggtgtacagcgatgcccagccccacatccagtggctgaagcacatcgtcatcaacggcagcagcttcggagccgacggtttcccctatgtgcaagtcctaaagactgcagacatcaatagctcagaggtggaggtcctgtacctgcggaacgtgtcagccgaggacgcaggcgagtacacctgcctcgcaggcaattccatcggcctctcctaccagtctgcctggctcacggtgctgccagtgcgagggcagaggaggaccccacatggaccgcagcagcgcccgaggccaggtatacggacatcatcctgtacgcgtcgggctccctggccttggctgtgctcctgctgctggccgggctgtatcgagggcaggcgctccacggccggcacccccgcccgcccgccactgtgcagaagctctcccgcttccctctggcccgacagttctccctggagtcaggctcttccggcaagtcaagctcatccctggtacgaggcgtgcgtctctcctccagcggccccgccttgctcgccggcctcgctggtgcttgggaagcccctaggcgagggctgctttggccaggtagtacgtgcagaggcctttggcatggaccctgcccggcctgaccaagccagcactgtggccgtcaagatgctcaaagacaacgcctctgacaaggacctggccgacctggtctcggagatggaggtgatgaagctgatcggccgacacaagaacatcatcaacctgcttggtgtctgcacccaggaagggcccctgtacgtgatcatggagtgcgccgccaagggaaacctgcgggagttcctgcgggcccggcgccccccaggccccgacctcagccccgacggtcctcggagcagtgaggggccgctctccttcccagtcctggtctcctgcgcctaccaggtggcccgaggcatgcagtatctggagtcccggaagtgtatccaccgggacctggctgcccgcaatgtgctggtgactgaggacaatgtgatgaagattgctgactttgggctggcccgcggcgtccaccacattgactactataagaaaaccagcaacggccgcctgcctgtgaagtggatggcgcccgaggccttgtttgaccgggtgtacacacaccagagtgacgtgtggtcttttgggatcccgctatgggagatcttcaccctcgggggctccccgtatcctggcatcccggtggaggagctgttctcgctgctgcgggagggacatcggatggaccgacccccacactgccccccagagctgtacgggctgatgcgtgagtgctggcacgcagcgccctcccagaggcctaccttcaagcagctggtggaggcgctggacaaggtcctgctggccgtctctgaggagtacctcgacctccgcctgaccttcggaccctattccccctctggtggggacgccagcagcacctgctcctccagcgattctgtcttcagccacgaccccctgccattgggatccagctccttccccttcgggtctggggtgcagaca

SEQ ID NO: 22 - protein, 789 aa, Homo sapiens
MRLLLALLGVLLSVPGPPVSSLEASEEVELEPCLAPSLEQQEQELTVALGQPVRLCCGRAERGGHWYKEGSRLAPAGRVRGWRGRLEIASFLPEDAGRYLCPARGSMIVLQNLTLITGDSLTSSNDDEDPESHRDLSNRHSYPQQAPYWTHPQRMEKKLHAVPAGNTVKFRCPAAGNPTPTIRWLKDGQAFHGENRIGGIRLRHQHWSLVMESVVPSDRGTYTCLVENAVGSIRYNYLLDVLERSPHRPILQAGLPANTTAVVGSDVELLCKVYSDAQPHIQWLKHIVINGSSFGADGFPYVQVLKTADINSSEVEVLYLRNVSAEDAGEYTCLAGNSIGLSYQSAWLTVLPVRGQRRTPHGPQQRPRPGIRTSSCTRRAPWPWLCSCCWPGCIEGRRSTAGTPARPPLCRSSPASLWPDSSPWSQALPASQAHPWYEACVSPPAAPPCSPASLVLGKPLGEGCFGQVVRAEAFGMDPARPDQASTVAVKMLKDNASDKDLADLVSEMEVMKLIGRHKNIINLLGVCTQEGPLYVIMECAAKGNLREFLRARRPPGPDLSPDGPRSSEGPLSFPVLVSCAYQVARGMQYLESRKCIHRDLAARNVLVTEDNVMKIADFGLARGVHHIDYYKKTSNGRLPVKWMAPEALFDRVYTHQSDVWSFGIPLWEIFTLGGSPYPGIPVEELFSLLREGHRMDRPPHCPPELYGLMRECWHAAPSQRPTFKQLVEALDKVLLAVSEEYLDLRLTFGPYSPSGGDASSTCSSSDSVFSHDPLPLGSSSFPFGSGVQT

SEQ ID NO: 23 - DNA, 2383 bp, Homo sapiens
  CDS (17)..(2383)
caccaagcttcccaccatgcggctgctgctggccctgttgggggtcctgctgagtgtgcctgggcctccagtctcgtccctggaggcctctgaggaagtggagcttgagccctgcctggctcccagcctggagcagcaagagcaggagctgacagtagcccttgggcagcctgtgcggctgtgctgtgggcgggctgagcgtggtggccactggtacaaggagggcagtcgcctggcacctgctggccgtgtacggggctggaggggccgcctagagattgccagcttcctacctgaggatgctggccgctacctctgcccggcacgaggctccatgatcgtcctgcagaatctcaccttgattacaggtgactccttgacctccagcaacgatgatgaggaccccgagtcccatagggacctctcgaataggcacagttacccccagcaagcaccctactggacacacccccagcgcatggagaagaaactgcatgcagtacctgcggggaacaccgtcaagttccgctgtccagctgcaggcaaccccacgcccaccatccgctggcttaaggatggacaggcctttcatggggagaaccgcattggaggcattcggctgcgccatcagcactggagtctcgtgatggagagcgtggtgccctcggaccgcggcacatacacctgcctggtagagaacgctgtgggcagcatccgttataactacctgctagatgtgctggagcggtccccgcaccggcccatcctgcaggccgggctcccggccaacaccacagccgtggtgggcagcgacgtggagctgctgtgcaaggtgtacagcgatgcccagccccacatccagtggctgaagcacatcgtcatcaacggcagcagcttcggagccgacggtttcccctatgtgcaagtcctaaagactgcagacatcaatagctcagaggtggaggtcctgtacctgcggaacgtgtcagccgaggacgcaggcgagtacacctgcctcgcaggcaattccatcggcctctcctaccagtctgcctggctcacggtgctgccagtgcgagggcagaggaggaccccacatggaccgcagcagcgcccgaggccaggtatacggacatcatcctgtacgcgtcgggctccctggccttggctgtgctcctgctgctggccgggctgtatcgagggcaggcgctccacggccggcacccccgcccgcccgccactgtgcagaagctctcccgcttccctctggcccgacagtcctccctggagtcaggctcttccggcaagtcaagctcatccctggtacgaggcgtgcgtctctcctccagcggccccgccttgctcgccggcctcgctggtgcttgggaagcccctaggcgagggctgctttggccaggtagtacgtgcagaggcctttggcatggaccctgcccggcctgaccaagccagcactgtggccgtcaagatgctcaaagacaacgcctctgacaaggacctggccgacctggtctcggagatggaggtgatgaagctgatcggccgacacaagaacatcatcaacctgcttggtgtctgcacccaggaagggcccctgtacgtgatcgtggagtgcgccgccaagggaaacctgcgggagttcctgcgggcccggcgccccccaggccccgacctcagccccgacggtcctcggagcagtgaggggccgctctccttcccagtcctggtctcctgcgcctaccaggtggcccgaggcatgcagtatctggagtcccggaagtgtatccaccgggacctggctgcccgcaatgtgctggtgactgaggacaatgtgatgaagattgctgactttgggctggcccgcggcgtccaccacattgactactataagaaaaccagcaacggccgcctgcctgtgaagtggatggcgcccgaggccttgtttgaccgggtgtacacacaccagagtgacgtgtggtcttttgggatcccgctatgggagatcttcaccctcgggggctccccgtatcctggcatcccggtggaggagctgttctcgctgctgcgggagggacatcggatggaccgacccccacactgccccccagagctgtacgggctgatgcgtgagtgctggcacgcagcgccctcccagaggcctaccttcaagcagctggtggaggcgctggacaaggtcctgctggccgtctctgaggagtacctcgacctccgcctgaccttcggaccctattccccctctggtggggacgccagcagcacctgctcctccagcgattctgtcttcagccacgaccccctgccattgggatccagctccttccccttcgggtctggggtgcagaca

SEQ ID NO: 24 - protein, 789 aa, Homo sapiens
MRLLLALLGVLLSVPGPPVSSLEASEEVELEPCLAPSLEQQEQELTVALGQPVRLCCGRAERGGHWYKEGSRLAPAGRVRGWRGRLEIASFLPEDAGRYLCPARGSMIVLQNLTLITGDSLTSSNDDEDPESHRDLSNRHSYPQQAPYWTHPQRMEKKLHAVPAGNTVKFRCPAAGNPTPTIRWLKDGQAFHGENRIGGIRLRHQHWSLVMESVVPSDRGTYTCLVENAVGSIRYNYLLDVLERSPHRPILQAGLPANTTAVVGSDVELLCKVYSDAQPHIQWLKHIVINGSSFGADGFPYVQVLKTADINSSEVEVLYLRNVSAEDAGEYTCLAGNSIGLSYQSAWLTVLPVRGQRRTPHGPQQRPRPGIRTSSCTRRAPWPWLCSCCWPGCIEGRRSTAGTPARPPLCRSSPASLWPDSPPWSQALPASQAHPWYEACVSPPAAPPCSPASLVLGKPLGEGCFGQVVRAEAFGMDPARPDQASTVAVKMLKDNASDKDLADLVSEMEVMKLIGRHKNIINLLGVCTQEGPLYVIVECAAKGNLREFLRARRPPGPDLSPDGPRSSEGPLSFPVLVSCAYQVARGMQYLESRKCIHRDLAARNVLVTEDNVMKIADFGLARGVHHIDYYKKTSNGRLPVKWMAPEALFDRVYTHQSDVWSFGIPLWEIFTLGGSPYPGIPVEELFSLLREGHRMDRPPHCPPELYGLMRECWHAAPSQRPTFKQLVEALDKVLLAVSEEYLDLRLTFGPYSPSGGDASSTCSSSDSVFSHDPLPLGSSSFPFGSGVQT

SEQ ID NO: 25 - DNA, 2383 bp, Homo sapiens
  CDS (17)..(2383)
caccaagcttcccaccatgcggctgctgctggccctgttgggggtcctgctgagtgtgcctgggcctccagtctcgtccctggaggcctctgaggaagtggagcttgagccctgcctggctcccagcctggagcagcaagagcaggagctgacagtagcccttgggcagcctgtgcggctgtgctgtgggcgggctgagcgtggtggccactggtacaaggagggcagtcgcctggcacctgctggccgtgtacggggctggaggggccgcctagagattgccagcttcctacctgaggatgctggccgctacctctgcccggcacgaggctccatgatcgtcctgcagaatctcaccttgattacaggtgactccttgacctccagcaacgatgatgaggaccccgagtcccatagggacctctcgaataggcacagttacccccagcaagcaccctactggacacacccccagcgcatggagaagaaactgcatgcagtacctgcggggaacaccgtcaagttccgctgtccagctgcaggcaaccccacgcccaccatccgctggcttaaggatggacaggcctttcatggggagaaccgcattggaggcattcggctgcgccatcagcactggagtctcgtgatggagagcgtggtgccctcggaccgcggcacatacacctgcctggtagagaacgctgtgggcagcatccgttataactacctgctagatgtgctggagcggtccccgcaccggcccatcctgcaggccgggctcccggccaacaccacagccgtggtgggcagcgacgtggagctgctgtgcaaggtgtacagcgatgcccagccccacatccagtggctgaagcacatcgtcatcaacggcagcagcttcggagccgacggtttcccctatgtgcaagtcctaaagactgcagacatcaatagctcagaggtggaggtcctgtacctgcggaacgtgtcagccgaggacgcaggcgagtacacctgcctcgcaggcaattccatcggcctctcctaccagtctgcctggctcacggtgctgccagtgcgagggcagaggaggaccccacatggaccgcagcagcgcccgaggccaggtatacggacatcatcctgtacgcgtcgggctccctggccttggctgtgctcctgctgctggccgggctgtatcgagggcaggcgctccacggccggcacccccgcccgcccgccactgtgcagaagctctcccgcttccctctggcccgacagttctccccggagtcaggctcttccggcaagtcaagctcatccctggtacgaggcgtgcgtctctcctccagcggccccgccttgctcgccggcctcgctggtgcttgggaagcccctaggcgagggctgctttggccaggtagtacgtgcagaggcctttggcatggaccctgcccggcctgaccaagccagcactgtggccgtcaagatgctcaaagacaacgcctctgacaaggacctggccgacctggtctcggagatggaggtgatgaagctgatcggccgacacaagaacatcatcaacctgcttggtgtctgcacccaggaagggcccctgtacgtgatcgtggagtgcgccgccaagggaaacctgcgggagttcctgcgggcccggcgccccccaggccccgacctcagccccgacggtcctcggagcagtgaggggccgctctccttcccagtcctggtctcctgcgcctaccaggtggcccgaggcatgcagtatctggagtcccggaagtgtatccaccgggacctggctgcccgcaatgtgctggtgactgaggacaatgtgatgaagattgctgactttgggctggcccgcggcgtccaccacattgactactataagaaaaccagcaacggccgcctgcctgtgaagtggatggcgcccgaggccttgtttgaccgggtgtacacacaccagagtgacgtgtggtcttttgggatcccgctatgggagatcttcaccctcgggggctccccgtatcctggcatcccggtggaggagctgttctcgctgctgcgggagggacatcggatggaccgacccccacactgccccccagagctgtacgggctgatgcgtgagtgctggcacgcagcgccctcccagaggcctaccttcaagcagctggtggaggcgctggacaaggtcctgctggccgtctctgaggagtacctcgacctccgcctgaccttcggaccctattccccctctggtggggacgccagcagcacctgctcctccagcgattctgtcttcagccacgaccccctgccattgggatccagctccttccccttcgggtctggggtgcagaca

SEQ ID NO: 26 - protein, 789 aa, Homo sapiens
MRLLLALLGVLLSVPGPPVSSLEASEEVELEPCLAPSLEQQEQELTVALGQPVRLCCGRAERGGHWYKEGSRLAPAGRVRGWRGRLEIASFLPEDAGRYLCPARGSMIVLQNLTLITGDSLTSSNDDEDPESHRDLSNRHSYPQQAPYWTHPQRMEKKLHAVPAGNTVKFRCPAAGNPTPTIRWLKDGQAFHGENRIGGIRLRHQHWSLVMESVVPSDRGTYTCLVENAVGSIRYNYLLDVLERSPHRPILQAGLPANTTAVVGSDVELLCKVYSDAQPHIQWLKHIVINGSSFGADGFPYVQVLKTADINSSEVEVLYLRNVSAEDAGEYTCLAGNSIGLSYQSAWLTVLPVRGQRRTPHGPQQRPRPGIRTSSCTRRAPWPWLCSCCWPGCIEGRRSTAGTPARPPLCRSSPASLWPDSSPRSQALPASQAHPWYEACVSPPAAPPCSPASLVLGKPLGEGCFGQVVRAEAFGMDPARPDQASTVAVKMLKDNASDKDLADLVSEMEVMKLIGRHKNIINLLGVCTQEGPLYVIVECAAKGNLREFLRARRPPGPDLSPDGPRSSEGPLSFPVLVSCAYQVARGMQYLESRKCIHRDLAARNVLVTEDNVMKIADFGLARGVHHIDYYKKTSNGRLPVKWMAPEALFDRVYTHQSDVWSFGIPLWEIFTLGGSPYPGIPVEELFSLLREGHRMDRPPHCPPELYGLMRECWHAAPSQRPTFKQLVEALDKVLLAVSEEYLDLRLTFGPYSPSGGDASSTCSSSDSVFSHDPLPLGSSSFPFGSGVQT

SEQ ID NO: 27 - DNA, 2383 bp, Homo sapiens
  CDS (17)..(2383)
caccaagcttcccaccatgcggctgctgctggccctgttgggggtcctgctgagtgtgcctgggcctccagtctcgtccctggaggcctctgaggaagtggagcttgagccctgcctggctcccagcctggagcagcaagagcaggagctgacagtagcccttgggcagcctgtgcggctgtgctgtgggcgggctgagcgtggtggccactggtacaaggagggcagtcgcctggcacctgctggccgtgtacggggctggaggggccgcctagagattgccagcttcctacctgaggatgctggccgctacctctgcccggcacgaggctccatgatcgtcctgcagaatctcaccttgattacaggtgactccttgacctccagcaacgatgatgaggaccccgagtcccatagggacctctcgaataggcacagttacccccagcaagcaccctactggacacacccccagcgcatggagaagaaactgcatgcagtacctgcggggaacaccgtcaagttccgctgtccagctgcaggcaaccccacgcccaccatccgctggcttaaggatggacaggcctttcatggggagaaccgcattggaggcattcggctgcgccatcagcactggagtctcgtgatggagagcgtggtgccctcggaccgcggcacatacacctgcctggtagagaacgctgtgggcagcatccgttataactacctgctagatgtgctggagcggtccccgcaccggcccatcctgcaggccgggctcccggccaacaccacagccgtggtgggcagcgacgtggagctgctgtgcaaggtgtacagcgatgcccagccccacatccagtggctgaagcacatcgtcatcaacggcagcagcttcggagccgacggtttcccctatgtgcaagtcctaaagactgcagacatcaatagctcagaggtggaggtcctgtacctgcggaacgtgtcagccgaggacgcaggcgagtacacctgcctcgcaggcaattccatcggcctctcctaccagtctgcctggctcacggtgctgccagtgcgagggcagaggaggaccccacatggaccgcagcagcgcccgaggccaggtatacggacatcatcctgtacgcgtcgggctccctggccttggctgtgctcctgctgctggccgggctgtatcgagggcaggcgctccacggccggcacccccgcccgcccgccactgtgcagaagctctcccgcttccctctggcccgacagttctccctggagtcagactcttccggcaagtcaagctcatccctggtacgaggcgtgcgtctctcctccagcggccccgccttgctcgccggcctcgctggtgcttgggaagcccctaggcgagggctgctttggccaggtagtacgtgcagaggcctttggcatggaccctgcccggcctgaccaagccagcactgtggccgtcaagatgctcaaagacaacgcctctgacaaggacctggccgacctggtctcggagatggaggtgatgaagctgatcggccgacacaagaacatcatcaacctgcttggtgtctgcacccaggaagggcccctgtacgtgatcgtggagtgcgccgccaagggaaacctgcgggagttcctgcgggcccggcgccccccaggccccgacctcagccccgacggtcctcggagcagtgaggggccgctctccttcccagtcctggtctcctgcgcctaccaggtggcccgaggcatgcagtatctggagtcccggaagtgtatccaccgggacctggctgcccgcaatgtgctggtgactgaggacaatgtgatgaagattgctgactttgggctggcccgcggcgtccaccacattgactactataagaaaaccagcaacggccgcctgcctgtgaagtggatggcgcccgaggccttgtttgaccgggtgtacacacaccagagtgacgtgtggtcttttgggatcccgctatgggagatcttcaccctcgggggctccccgtatcctggcatcccggtggaggagctgttctcgctgctgcgggagggacatcggatggaccgacccccacactgccccccagagctgtacgggctgatgcgtgagtgctggcacgcagcgccctcccagaggcctaccttcaagcagctggtggaggcgctggacaaggtcctgctggccgtctctgaggagtacctcgacctccgcctgaccttcggaccctattccccctctggtggggacgccagcagcacctgctcctccagcgattctgtcttcagccacgaccccctgccattgggatccagctccttccccttcgggtctggggtgcagaca

SEQ ID NO: 28 - protein, 789 aa, Homo sapiens
MRLLLALLGVLLSVPGPPVSSLEASEEVELEPCLAPSLEQQEQELTVALGQPVRLCCGRAERGGHWYKEGSRLAPAGRVRGWRGRLEIASFLPEDAGRYLCPARGSMIVLQNLTLITGDSLTSSNDDEDPESHRDLSNRHSYPQQAPYWTHPQRMEKKLHAVPAGNTVKFRCPAAGNPTPTIRWLKDGQAFHGENRIGGIRLRHQHWSLVMESVVPSDRGTYTCLVENAVGSIRYNYLLDVLERSPHRPILQAGLPANTTAVVGSDVELLCKVYSDAQPHIQWLKHIVINGSSFGADGFPYVQVLKTADINSSEVEVLYLRNVSAEDAGEYTCLAGNSIGLSYQSAWLTVLPVRGQRRTPHGPQQRPRPGIRTSSCTRRAPWPWLCSCCWPGCIEGRRSTAGTPARPPLCRSSPASLWPDSSPWSQTLPASQAHPWYEACVSPPAAPPCSPASLVLGKPLGEGCFGQVVRAEAFGMDPARPDQASTVAVKMLKDNASDKDLADLVSEMEVMKLIGRHKNIINLLGVCTQEGPLYVIVECAAKGNLREFLRARRPPGPDLSPDGPRSSEGPLSFPVLVSCAYQVARGMQYLESRKCIHRDLAARNVLVTEDNVMKIADFGLARGVHHIDYYKKTSNGRLPVKWMAPEALFDRVYTHQSDVWSFGIPLWEIFTLGGSPYPGIPVEELFSLLREGHRMDRPPHCPPELYGLMRECWHAAPSQRPTFKQLVEALDKVLLAVSEEYLDLRLTFGPYSPSGGDASSTCSSSDSVFSHDPLPLGSSSFPFGSGVQT

SEQ ID NO: 29 - DNA, 2383 bp, Homo sapiens
  CDS (17)..(2383)
caccaagcttcccaccatgcggctgctgctggccctgttgggggtcctgctgagtgtgcctgggcctccagtctcgtccctggaggcctctgaggaagtggagcttgagccctgcctggctcccagcctggagcagcaagagcaggagctgacagtagcccttgggcagcctgtgcggctgtgctgtgggcgggctgagcgtggtggccactggtacaaggagggcagtcgcctggcacctgctggccgtgtacggggctggaggggccgcctagagattgccagcttcctacctgaggatgctggccgctacctctgcccggcacgaggctccatgatcgtcctgcagaatctcaccttgattacaggtgactccttgacctccagcaacgatgatgaggaccccgagtcccatagggacctctcgaataggcacagttacccccagcaagcaccctactggacacacccccagcgcatggagaagaaactgcatgcagtacctgcggggaacaccgtcaagttccgctgtccagctgcaggcaaccccacgcccaccatccgctggcttaaggatggacaggcctttcatggggagaaccgcattggaggcattcggctgcgccatcagcactggagtctcgtgatggagagcgtggtgccctcggaccgcggcacatacacctgcctggtagagaacgctgtgggcagcatccgttataactacctgctagatgtgctggagcggtccccgcaccggcccatcctgcaggccgggctcccggccaacaccacagccgtggtgggcagcgacgtggagctgctgtgcaaggtgtacagcgatgcccagccccacatccagtggctgaagcacatcgtcatcaacggcagcagcttcggagccgacggtttcccctatgtgcaagtcctaaagactgcagacatcaatagctcagaggtggaggtcctgtacctgcggaacgtgtcagccgaggacgcaggcgagtacacctgcctcgcaggcaattccatcggcctctcctaccagtctgcctggctcacggtgctgccagtgcgagggcagaggaggaccccacatggaccgcagcagcgcccgaggccaggtatacggacatcatcctgtacgcgtcgggctccctggccttggctgtgctcctgctgctggccgggctgtatcgagggcaggcgctccacggccggcacccccgcccgcccgccactgtgcagaagctctcccgcttccctctggcccgacagttctccctggagtcaggctcttccggcaagtcaagctcatccctggtacgaggcgtgcgtctctcctccagcggccccgccttgctcgccggcctcgctggtgcttgggaagcccctaggcgagggctgctttggccaggtagtacgtgcagaggcctttggcatggaccctgcccggcctgaccaagccagcactgtggccgtcaagatgctcaaagacaacgcctctgacaaggacctggccgacctggtctcggagatggaggtgatgaagctgatcggccgacacaagaacatcatcaacctgcttggtgtctgcacccaggaagggcccctgtacgtgatcgtggagtgcgccgccaagggaaacctgcgggagttcctgcgggcccggcgccccccaggccccgacctcagccccgacggtcctcggagcagtgaggggccgctctccttcccagtcctggtctcctgcgcctaccaggtggcccgaggcatgcagtatctggagtcccggaagtgtatccaccgggacctggctgcccgcaatgtgctggtgactgaggacaatgtgatgaagattgctgactttgggctggcccgcggcgtccaccacattgactactataagaaaaccagcaacggccgcctgcctgtgaagtggatggcgcccgaggccttgtttgaccgggtgtacacacaccagagtgacgtgtggtcttttgggatcccgctatgggagatcttcaccctcgggggctccccgtatcctggcatcccggtggaggagctgttctcgctgctgcgggagggacatcggatggaccgacccccacactgccccccagagctgtacgggctgatgcgtgagtgctggcacgcagcgccctcccagaggcctaccttcaagcagctggtggaggcgctggacaaggtcctgctggccgtctctgaggagtacctcgacctccgcctggccttcggaccctattccccctctggtggggacgccagcagcacctgctcctccagcgattctgtcttcagccacgaccccctgccattgggatccagctccttccccttcgggtctggggtgcagaca

SEQ ID NO: 30 - protein, 789 aa, Homo sapiens
MRLLLALLGVLLSVPGPPVSSLEASEEVELEPCLAPSLEQQEQELTVALGQPVRLCCGRAERGGHWYKEGSRLAPAGRVRGWRGRLEIASFLPEDAGRYLCPARGSMIVLQNLTLITGDSLTSSNDDEDPESHRDLSNRHSYPQQAPYWTHPQRMEKKLHAVPAGNTVKFRCPAAGNPTPTIRWLKDGQAFHGENRIGGIRLRHQHWSLVMESVVPSDRGTYTCLVENAVGSIRYNYLLDVLERSPHRPILQAGLPANTTAVVGSDVELLCKVYSDAQPHIQWLKHIVINGSSFGADGFPYVQVLKTADINSSEVEVLYLRNVSAEDAGEYTCLAGNSIGLSYQSAWLTVLPVRGQRRTPHGPQQRPRPGIRTSSCTRRAPWPWLCSCCWPGCIEGRRSTAGTPARPPLCRSSPASLWPDSSPWSQALPASQAHPWYEACVSPPAAPPCSPASLVLGKPLGEGCFGQVVRAEAFGMDPARPDQASTVAVKMLKDNASDKDLADLVSEMEVMKLIGRHKNIINLLGVCTQEGPLYVIVECAAKGNLREFLRARRPPGPDLSPDGPRSSEGPLSFPVLVSCAYQVARGMQYLESRKCIHRDLAARNVLVTEDNVMKIADFGLARGVHHIDYYKKTSNGRLPVKWMAPEALFDRVYTHQSDVWSFGIPLWEIFTLGGSPYPGIPVEELFSLLREGHRMDRPPHCPPELYGLMRECWHAAPSQRPTFKQLVEALDKVLLAVSEEYLDLRLAFGPYSPSGGDASSTCSSSDSVFSHDPLPLGSSSFPFGSGVQT

SEQ ID NO: 31 - DNA, 2383 bp, Homo sapiens
  CDS (17)..(2383)
caccaagcttcccaccatgcggctgctgctggccctgttgggggtcctgctgagtgtgcctgggcctccagtctcgtccctggaggcctctgaggaagtggagcttgagccctgcctggctcccagcctggagcagcaagagcaggagctgacagtagcccttgggcagcctgtgcggctgtgctgtgggcgggctgagcgtggtggccactggtacaaggagggcagtcgcctggcacctgctggccgtgtacggggctggaggggccgcctagagattgccagcttcctacctgaggatgctggccgctacctctgcccggcacgaggctccatgatcgtcctgcagaatctcaccttgattacaggtgactccttgacctccagcaacgatgatgaggaccccgagtcccatagggacctctcgaataggcacagttacccccagcaagcaccctactggacacacccccagcgcatggagaagaaactgcatgcagtacctgcggggaacaccgtcaagttccgctgtccagctgcaggcaaccccacgcccaccatccgctggcttaaggatggacaggcctttcatggggagaaccgcattggaggcattcggctgcgccatcagcactggagtctcgtgatggagagcgtggtgccctcggaccgcggcacatacacctgcctggtagagaacgctgtgggcagcatccgttataactacctgctagatgtgctggagcggtccccgcaccggcccatcctgcaggccgggctcccggccaacaccacagccgtggtgggcagcgacgtggagccgctgtgcaaggtgtacagcgatgcccagccccacatccagtggctgaagcacatcgtcatcaacggcagcagcttcggagccgacggtttcccctatgtgcaagtcctaaagactgcagacatcaatagctcagaggtggaggtcctgtacctgcggaacgtgtcagccgaggacgcaggcgagtacacctgcctcgcaggcaattccatcggcctctcctaccagtctgcctggctcacggtgctgccagtgcgagggcagaggaggaccccacatggaccgcagcagcgcccgaggccaggtatacggacatcatcctgtacgcgtcgggctccctggccttggctgtgctcctgctgctggccgggctgtatcgagggcaggcgctccacggccggcacccccgcccgcccgccactgtgcagaagctctcccgcttccctctggcccgacagttctccctggagtcaggctcttccggcaagtcaagctcatccctggtacgaggcgtgcgtctctcctccagcggccccgccttgctcgccggcctcgctggtgcttgggaagcccctaggcgagggctgctttggccaggtagtacgtgcagaggcctttggcatggaccctgcccggcctgaccaagccagcactgtggccgtcaagatgctcaaagacaacgcctctgacaaggacctggccgacctggtctcggagatggaggtgatgaagctgatcggccgacacaagaacatcatcaacctgcttggtgtctgcacccaggaagggcccctgtacgtgatcgtggagtgcgccgccaagggaaacctgcgggagttcctgcgggcccggcgccccccaggccccgacctcagccccgacggtcctcggagcagtgaggggccgctctccttcccagtcctggtctcctgcgcctaccaggtggcccgaggcatgcagtatctggagtcccggaagtgtatccaccgggacctggctgcccgcaatgtgctggtgactgaggacaatgtgatgaagattgctgactttgggctggcccgcggcgtccaccacattgactactataagaaaaccagcaacggccgcctgcctgtgaagtggatggcgcccgaggccttgtttgaccgggtgtacacacaccagagtgacgtgtggtcttttgggatcccgctatgggagatcttcaccctcgggggctccccgtatcctggcatcccggtggaggagctgttctcgctgctgcgggagggacatcggatggaccgacccccacactgccccccagagctgtacgggctgatgcgtgagtgctggcacgcagcgccctcccagaggcctaccttcaagcagctggtggaggcgctggacaaggtcctgctggccgtctctgaggagtacctcgacctccgcctgaccttcggaccctattccccctctggtggggacgccagcagcacctgctcctccagcgattctgtcttcagccacgaccccctgccattgggatccagctccttccccttcgggtctggggtgcagaca

SEQ ID NO: 32 - protein, 789 aa, Homo sapiens
MRLLLALLGVLLSVPGPPVSSLEASEEVELEPCLAPSLEQQEQELTVALGQPVRLCCGRAERGGHWYKEGSRLAPAGRVRGWRGRLEIASFLPEDAGRYLCPARGSMIVLQNLTLITGDSLTSSNDDEDPESHRDLSNRHSYPQQAPYWTHPQRMEKKLHAVPAGNTVKFRCPAAGNPTPTIRWLKDGQAFHGENRIGGIRLRHQHWSLVMESVVPSDRGTYTCLVENAVGSIRYNYLLDVLERSPHRPILQAGLPANTTAVVGSDVEPLCKVYSDAQPHIQWLKHIVINGSSFGADGFPYVQVLKTADINSSEVEVLYLRNVSAEDAGEYTCLAGNSIGLSYQSAWLTVLPVRGQRRTPHGPQQRPRPGIRTSSCTRRAPWPWLCSCCWPGCIEGRRSTAGTPARPPLCRSSPASLWPDSSPWSQALPASQAHPWYEACVSPPAAPPCSPASLVLGKPLGEGCFGQVVRAEAFGMDPARPDQASTVAVKMLKDNASDKDLADLVSEMEVMKLIGRHKNIINLLGVCTQEGPLYVIVECAAKGNLREFLRARRPPGPDLSPDGPRSSEGPLSFPVLVSCAYQVARGMQYLESRKCIHRDLAARNVLVTEDNVMKIADFGLARGVHHIDYYKKTSNGRLPVKWMAPEALFDRVYTHQSDVWSFGIPLWEIFTLGGSPYPGIPVEELFSLLREGHRMDRPPHCPPELYGLMRECWHAAPSQRPTFKQLVEALDKVLLAVSEEYLDLRLTFGPYSPSGGDASSTCSSSDSVFSHDPLPLGSSSFPFGSGVQT

SEQ ID NO: 33 - DNA, 2383 bp, Homo sapiens
  CDS (17)..(2383)
caccaagcttcccaccatgcggctgctgctggccctgttgggggtcctgctgagtgtgcctgggcctccagtctcgtccctggaggcctctgaggaagtggagcttgagccctgcctggctcccagcctggagcagcaagagcaggagctgacagtagcccttgggcagcctgtgcggctgtgctgtgggcgggctgagcgtggtggccactggtacaaggagggcagtcgcctggcacctgctggccgtgtacggggctggaggggccgcctagagattgccagcttcctacctgaggatgctggccgctacctctgcccggcacgaggctccatgatcgtcctgcagaatctcaccttgattacaggtgactccttgacctccagcaacgatgatgaggaccccgagtcccatagggacctctcgaataggcacagttacccccagcaagcaccctactggacacacccccagcgcatggagaagaaactgcatgcagtacctgcggggaacaccgtcaagttccgctgtccagctgcaggcaaccccacgcccaccatccgctggcttaaggatggacaggcctttcatggggagaaccgcattggaggcattcggctgcgccatcagcactggagtctcgtgatggagagcgtggtgccctcggaccgcggcacatacacctgcctggtagagaacgctgtgggcagcatccgttataactacctgctagatgtgctggagcggtccccgcaccggcccatcctgcaggccgggctcccggccaacaccacagccgtggtgggcagcgacgtggagctgctgtgcaaggtgtacagcgatgcccagccccacatccagtggctgaagcacatcgtcatcaacggcagcagcttcggagccgacggtttcccctatgtgcaagtcctaaagactgcagacatcaatagctcagaggtggaggtcctgtacctgcggaacgtgtcagccgaggacgcaggcgagtacacctgcctcgcaggcaattccatcggcctctcctaccagtctgcctggctcacggtgctgccagtgcgagggcagaggaggaccccacatggaccgcagcagcgcccgaggccaggtatacggacatcatcctgtacgcgtcgggctccctggccttggctgtgctcctgctgctggccgggctgtatcgagggcaggcgctccacggccggcacccccgcccgcccgccactgtgcagaagctctcccgcttccctctggcccgacagttctccctggagtcaggctcttccggcaagtcaagctcatccctggtacgaggcgtgcgtctctcctccagcggccccgccttgctcgccggcctcgctggtgcttgggaagcccctaggcgagggctgctttggccaggtagtacgtgcagaggcctttggcatggaccctgcccggcctgaccaagccagcactgtggccgtcaagatgctcaaagacaacgcctctgacaaggacctggccgacctggtctcggagatggaggtgatgaagctgatcggccgacacaagaacatcatcaacctgcttggtgtctgcacccaggaagggcccctgtacgtgatcgtggagtgcgccgccaagggaaacctgcgggagttcctgcgggcccggcgccccccaggccccgacctcagccccgacggtcctcggagcagtgaggggccgctctccttcccagtcctggtctcctgcgcctaccaggtggcccgaggcatgcagtatctggagtcccggaagtgtatccaccgggacctggctgcccgcaatgtgctggtgactgaggacaatgtgatgaagattgctgactttgggctggcccgcggcgtccaccacattgactactataagaaaaccagcaacggccgcctgcctgtgaagtggatggcgcccgaggccttgtttgaccgggtgtacacacaccagagtgacgtgtggtcttttgggatcccgctatgggagatcttcaccctcgggggctccccgtatcctggcatcccggtggaggagctgttctcgctgctgcgggagggacatcggatggaccgacccccacactgccccccagagctgtacgggctgatgcgtgagtgctggcacgcagcgcccccccagaggcctaccttcaagcagctggtggaggcgctggacaaggtcctgctggccgtctctgaggagtacctcgacctccgcctgaccttcggaccctattccccctctggtggggacgccagcagcacctgctcctccagcgattctgtcttcagccacgaccccctgccattgggatccagctccttccccttcgggtctggggtgcagaca

SEQ ID NO: 34 - protein, 789 aa, Homo sapiens
MRLLLALLGVLLSVPGPPVSSLEASEEVELEPCLAPSLEQQEQELTVALGQPVRLCCGRAERGGHWYKEGSRLAPAGRVRGWRGRLEIASFLPEDAGRYLCPARGSMIVLQNLTLITGDSLTSSNDDEDPESHRDLSNRHSYPQQAPYWTHPQRMEKKLHAVPAGNTVKFRCPAAGNPTPTIRWLKDGQAFHGENRIGGIRLRHQHWSLVMESVVPSDRGTYTCLVENAVGSIRYNYLLDVLERSPHRPILQAGLPANTTAVVGSDVELLCKVYSDAQPHIQWLKHIVINGSSFGADGFPYVQVLKTADINSSEVEVLYLRNVSAEDAGEYTCLAGNSIGLSYQSAWLTVLPVRGQRRTPHGPQQRPRPGIRTSSCTRRAPWPWLCSCCWPGCIEGRRSTAGTPARPPLCRSSPASLWPDSSPWSQALPASQAHPWYEACVSPPAAPPCSPASLVLGKPLGEGCFGQVVRAEAFGMDPARPDQASTVAVKMLKDNASDKDLADLVSEMEVMKLIGRHKNIINLLGVCTQEGPLYVIVECAAKGNLREFLRARRPPGPDLSPDGPRSSEGPLSFPVLVSCAYQVARGMQYLESRKCIHRDLAARNVLVTEDNVMKIADFGLARGVHHIDYYKKTSNGRLPVKWMAPEALFDRVYTHQSDVWSFGIPLWEIFTLGGSPYPGIPVEELFSLLREGHRMDRPPHCPPELYGLMRECWHAAPPQRPTFKQLVEALDKVLLAVSEEYLDLRLTFGPYSPSGGDASSTCSSSDSVFSHDPLPLGSSSFPFGSGVQT

SEQ ID NO: 35 - DNA, 2383 bp, Homo sapiens
  CDS (17)..(2383)
caccaagcttcccaccatgcggctgctgctggccctgttgggggtcctgctgagtgtgcctgggcctccagtctcgtccctggaggcctctgaggaagtggagcttgagccctgcctggctcccagcctggagcagcaagagcaggagctgacagtagcccttgggcagcctgtgcggctgtgctgtgggcgggctgagcgtggtggccactggtacaaggagggcagtcgcctggcacctgctggccgtgtacggggctggaggggccgcctagagattgccagcttcctacctgaggatgctggccgctacctctgcccggcacgaggctccatgatcgtcctgcagaatctcaccttgattacaggtgactccttgacctccagcaacgatgatgaggaccccgagtcccatagggacctctcgaataggcacagttacccccagcaagcaccctactggacacacccccagcgcatggagaagaaactgcatgcagtacctgcggggaacaccgtcaagttccgctgtccagctgcaggcaaccccacgcccaccatccgctggcttaaggatggacaggcctttcatggggagaaccgcattggaggcattcggctgcgccatcagcactggagtctcgtgatggagagcgtggtgccctcggaccgcggcacatacacctgcctggtagagaacgctgtgggcagcatccgttataactacctgctagatgtgctggagcggtccccgcaccggcccatcctgcgggccgggctcccggccaacaccacagccgtggtgggcagcgacgtggagctgctgtgcaaggtgtacagcgatgcccagccccacatccagtggctgaagcacatcgtcatcaacggcagcagcttcggagccgacggtttcccctatgtgcaagtcctaaagactgcagacatcaatagctcagaggtggaggtcctgtacctgcggaacgtgtcagccgaggacgcaggcgagtacacctgcctcgcaggcaattccatcggcctctcctaccagtctgcctggctcacggtgctgccagtgcgagggcagaggaggaccccacatggaccgcagcagcgcccgaggccaggtatacggacatcatcctgtacgcgtcgggctccctggccttggctgtgctcctgctgctggccgggctgtatcgagggcaggcgctccacggccggcacccccgcccgcccgccactgtgcagaagctctcccgcttccctctggcccgacagttctccctggagtcaggctcttccggcaagtcaagctcatccctggtacgaggcgtgcgtctctcctccagcggccccgccttgctcgccggcctcgctggtgcttgggaagcccctaggcgagggctgctttggccaggtagtacgtgcagaggcctttggcatggaccctgcccggcctgaccaagccagcactgtggccgtcaagatgctcaaagacaacgcctctgacaaggacctggccgacctggtctcggagatggaggtgatgaagctgatcggccgacacaagaacatcatcaacctgcttggtgtctgcacccaggaagggcccctgtacgtgatcgtggagtgcgccgccaagggaaacctgcgggagttcctgcgggcccggcgccccccaggccccgacctcagccccgacggtcctcggagcagtgaggggccgctctccttcccagtcctggtctcctgcgcctaccaggtggcccgaggcatgcagtatctggagtcccggaagtgtatccaccgggacctggctgcccgcaatgtgctggtgactgaggacaatgtgatgaagattgctgactttgggctggcccgcggcgtccaccacattgactactataagaaaaccagcaacggccgcctgcctgtgaagtggatggcgcccgaggccttgtttgaccgggtgtacacacaccagagtgacgtgtggtcttttgggatcccgctatgggagatcttcaccctcgggggctccccgtatcctggcatcccggtggaggagctgttctcgctgctgcgggagggacatcggatggaccgacccccacactgccccccagagctgtacgggctgatgcgtgagtgctggcacgcagcgccctcccagaggcctaccttcaagcagctggtggaggcgctggacaaggtcctgctggccgtctctgaggagtacctcgacctccgcctgaccttcggaccctattccccctctggtggggacgccagcagcacctgctcctccagcgattctgtcttcagccacgaccccctgccattgggatccagctccttccccttcgggtctggggtgcagaca

SEQ ID NO: 36 - protein, 789 aa, Homo sapiens
MRLLLALLGVLLSVPGPPVSSLEASEEVELEPCLAPSLEQQEQELTVALGQPVRLCCGRAERGGHWYKEGSRLAPAGRVRGWRGRLEIASFLPEDAGRYLCPARGSMIVLQNLTLITGDSLTSSNDDEDPESHRDLSNRHSYPQQAPYWTHPQRMEKKLHAVPAGNTVKFRCPAAGNPTPTIRWLKDGQAFHGENRIGGIRLRHQHWSLVMESVVPSDRGTYTCLVENAVGSIRYNYLLDVLERSPHRPILRAGLPANTTAVVGSDVELLCKVYSDAQPHIQWLKHIVINGSSFGADGFPYVQVLKTADINSSEVEVLYLRNVSAEDAGEYTCLAGNSIGLSYQSAWLTVLPVRGQRRTPHGPQQRPRPGIRTSSCTRRAPWPWLCSCCWPGCIEGRRSTAGTPARPPLCRSSPASLWPDSSPWSQALPASQAHPWYEACVSPPAAPPCSPASLVLGKPLGEGCFGQVVRAEAFGMDPARPDQASTVAVKMLKDNASDKDLADLVSEMEVMKLIGRHKNIINLLGVCTQEGPLYVIVECAAKGNLREFLRARRPPGPDLSPDGPRSSEGPLSFPVLVSCAYQVARGMQYLESRKCIHRDLAARNVLVTEDNVMKIADFGLARGVHHIDYYKKTSNGRLPVKWMAPEALFDRVYTHQSDVWSFGIPLWEIFTLGGSPYPGIPVEELFSLLREGHRMDRPPHCPPELYGLMRECWHAAPSQRPTFKQLVEALDKVLLAVSEEYLDLRLTFGPYSPSGGDASSTCSSSDSVFSHDPLPLGSSSFPFGSGVQT

SEQ ID NO: 37 - DNA, 2383 bp, Homo sapiens
  CDS (17)..(2383)
caccaagcttcccaccatgcggctgctgctggccctgttgggggtcctgctgagtgtgcctgggcctccagtctcgttcctggaggcctctgaggaagtggagcttgagccctgcctggctcccagcctggagcagcaagagcaggagctgacagtagcccttgggcagcctgtgcggctgtgctgtgggcgggctgagcgtggtggccactggtacaaggagggcagtcgcctggcacctgctggccgtgtacggggctggaggggccgcctagagattgccagcttcctacctgaggatgctggccgctacctctgcccggcacgaggctccatgatcgtcctgcagaatctcaccttgattacaggtgactccttgacctccagcaacgatgatgaggaccccgagtcccatagggacctctcgaataggcacagttacccccagcaagcaccctactggacacacccccagcgcatggagaagaaactgcatgcagtacctgcggggaacaccgtcaagttccgctgtccagctgcaggcaaccccacgcccaccatccgctggcttaaggatggacaggcctttcatggggagaaccgcattggaggcattcggctgcgccatcagcactggagtctcgtgatggagagcgtggtgccctcggaccgcggcacatacacctgcctggtagagaacgctgtgggcagcatccgttataactacctgctagatgtgctggagcggtccccgcaccggcccatcctgcaggccgggctcccggccaacaccacagccgtggtgggcagcgacgtggagctgctgtgcaaggtgtacagcgatgcccagccccacatccagtggctgaagcacatcgtcatcaacggcagcagcttcggagccgacggtttcccctatgtgcaagtcctaaagactgcagacatcaatagctcagaggtggaggtcctgtacctgcggaacgtgtcagccgaggacgcaggcgagtacacctgcctcgcaggcaattccatcggcctctcctaccagtctgcctggctcacggtgctgccagtgcgagggcagaggaggaccccacatggaccgcagcagcgcccgaggccaggtatacggacatcatcctgtacgcgtcgggctccctggccttggctgtgctcctgctgctggccgggctgtatcgagggcaggcgctccacggccggcacccccgcccgcccgccactgtgcagaagctctcccgcttccctctggcccgacagttctccctggagtcaggctcttccggcaagtcaagctcatccctggtacgaggcgtgcgtctctcctccagcggccccgccttgctcgccggcctcgctggtgcttgggaagcccctaggcgagggctgctttggccaggtagtacgtgcagaggcctttggcatggaccctgcccggcctgaccaagccagcactgtggccgtcaagatgctcaaagacaacgcctctgacaaggacctggccgacctggtctcggagatggaggtgatgaagctgatcggccgacacaagaacatcatcaacctgcttggtgtctgcacccaggaagggcccctgtacgtgatcgtggagtgcgccgccaagggaaacctgcgggagttcctgcgggcccggcgccccccaggccccgacctcagccccgacggtcctcggagcagtgaggggccgctctccttcccagtcctggtctcctgcgcctaccaggtggcccgaggcatgcagtatctggagtcccggaagtgtatccaccgggacctggctgcccgcaatgtgctggtgactgaggacaatgtgatgaagattgctgactttgggctggcccgcggcgtccaccacattgactactataagaaaaccagcaacggccgcctgcctgtgaagtggatggcgcccgaggccttgtttgaccgggtgtacacacaccagagtgacgtgtggtcttttgggatcccgctatgggagatcttcaccctcgggggctccccgtatcctggcatcccggtggaggagctgttctcgctgctgcgggagggacatcggatggaccgacccccacactgccccccagagctgtacgggctgatgcgtgagtgctggcacgcagcgccctcccagaggcctaccttcaagcagctggtggaggcgctggacaaggtcctgctggccgtctctgaggagtacctcgacctccgcctgaccttcggaccctattccccctctggtggggacgccagcagcacctgctcctccagcgattctgtcttcagccacgaccccctgccattgggatccagctccttccccttcgggtctggggtgcagaca

SEQ ID NO: 38 - protein, 789 aa, Homo sapiens
MRLLLALLGVLLSVPGPPVSFLEASEEVELEPCLAPSLEQQEQELTVALGQPVRLCCGRAERGGHWYKEGSRLAPAGRVRGWRGRLEIASFLPEDAGRYLCPARGSMIVLQNLTLITGDSLTSSNDDEDPESHRDLSNRHSYPQQAPYWTHPQRMEKKLHAVPAGNTVKFRCPAAGNPTPTIRWLKDGQAFHGENRIGGIRLRHQHWSLVMESVVPSDRGTYTCLVENAVGSIRYNYLLDVLERSPHRPILQAGLPANTTAVVGSDVELLCKVYSDAQPHIQWLKHIVINGSSFGADGFPYVQVLKTADINSSEVEVLYLRNVSAEDAGEYTCLAGNSIGLSYQSAWLTVLPVRGQRRTPHGPQQRPRPGIRTSSCTRRAPWPWLCSCCWPGCIEGRRSTAGTPARPPLCRSSPASLWPDSSPWSQALPASQAHPWYEACVSPPAAPPCSPASLVLGKPLGEGCFGQVVRAEAFGMDPARPDQASTVAVKMLKDNASDKDLADLVSEMEVMKLIGRHKNIINLLGVCTQEGPLYVIVECAAKGNLREFLRARRPPGPDLSPDGPRSSEGPLSFPVLVSCAYQVARGMQYLESRKCIHRDLAARNVLVTEDNVMKIADFGLARGVHHIDYYKKTSNGRLPVKWMAPEALFDRVYTHQSDVWSFGIPLWEIFTLGGSPYPGIPVEELFSLLREGHRMDRPPHCPPELYGLMRECWHAAPSQRPTFKQLVEALDKVLLAVSEEYLDLRLTFGPYSPSGGDASSTCSSSDSVFSHDPLPLGSSSFPFGSGVQT

SEQ ID NO: 39 - DNA, 2383 bp, Homo sapiens
  misc_feature (78)..(78): Wherein n may be a, c, g or t
  misc_feature (113)..(113): Wherein n may be a, c, g or t
  misc_feature (236)..(236): Wherein n may be a, c, g or t
  misc_feature (771)..(771): Wherein n may be a, c, g or t
  misc_feature (822)..(822): Wherein n may be a, c, g or t
  misc_feature (863)..(863): Wherein n may be a, c, g or t
  misc_feature (873)..(873): Wherein n may be a, c, g or t
  misc_feature (1262)..(1262): Wherein n may be a, c, g or t
  misc_feature (1280)..(1280): Wherein n may be a, c, g or t
  misc_feature (1286)..(1286): Wherein n may be a, c, g or t
  misc_feature (1295)..(1295): Wherein n may be a, c, g or t
  misc_feature (1442)..(1442): Wherein n may be a, c, g or t
  misc_feature (1625)..(1625): Wherein n may be a, c, g or t
  misc_feature (1626)..(1626): Wherein n may be a, c, g or t
  misc_feature (1628)..(1628): Wherein n may be a, c, g or t
  misc_feature (1775)..(1775): Wherein n may be a, c, g or t
  misc_feature (2168)..(2168): Wherein n may be a, c, g or t
  misc_feature (2255)..(2255): Wherein n may be a, c, g or t
caccaagcttcccaccatgcggctgctgctggccctgttgggggtcctgctgagtgtgcctgggcctccagtctcgtncctggaggcctctgaggaagtggagcttgagcccngcctggctcccagcctggagcagcaagagcaggagctgacagtagcccttgggcagcctgtgcggctgtgctgtgggcgggctgagcgtggtggccactggtacaaggagggcagtcgcctgncacctgctggccgtgtacggggctggaggggccgcctagagattgccagcttcctacctgaggatgctggccgctacctctgcccggcacgaggctccatgatcgtcctgcagaatctcaccttgattacaggtgactccttgacctccagcaacgatgatgaggaccccgagtcccatagggacctctcgaataggcacagttacccccagcaagcaccctactggacacacccccagcgcatggagaagaaactgcatgcagtacctgcggggaacaccgtcaagttccgctgtccagctgcaggcaaccccacgcccaccatccgctggcttaaggatggacaggcctttcatggggagaaccgcattggaggcattcggctgcgccatcagcactggagtctcgtgatggagagcgtggtgccctcggaccgcggcacatacacctgcctggtagagaacgctgtgggcagcatccgttataactacctgctagatgtgctggagcggtccccgcaccggcccatcctgcnggccgggctcccggccaacaccacagccgtggtgggcagcgacgtggagcngctgtgcaaggtgtacagcgatgcccagccccacatccagnggctgaagcncatcgtcatcaacggcagcagcttcggagccgacggtttcccctatgtgcaagtcctaaagactgcagacatcaatagctcagaggtggaggtcctgtacctgcggaacgtgtcagccgaggacgcaggcgagtacacctgcctcgcaggcaattccatcggcctctcctaccagtctgcctggctcacggtgctgccagtgcgagggcagaggaggaccccacatggaccgcagcagcgcccgaggccaggtatacggacatcatcctgtacgcgtcgggctccctggccttggctgtgctcctgctgctggccgggctgtatcgagggcaggcgctccacggccggcacccccgcccgcccgccactgtgcagaagctctcccgctnccctctggcccgacagtnctcccnggagtcagnctcttccggcaagtcaagctcatccctggtacgaggcgtgcgtctctcctccagcggccccgccttgctcgccggcctcgctggtgcttgggaagcccctaggcgagggctgctttggccaggtagtacgtgcagaggcctttggcntggaccctgcccggcctgaccaagccagcactgtggccgtcaagatgctcaaagacaacgcctctgacaaggacctggccgacctggtctcggagatggaggtgatgaagctgatcggccgacacaagaacatcatcaacctgcttggtgtctgcacccaggaagggcccctgtacgtgatcnngnagtgcgccgccaagggaaacctgcgggagttcctgcgggcccggcgccccccaggccccgacctcagccccgacggtcctcggagcagtgaggggccgctctccttcccagtcctggtctcctgcgcctaccaggtggcccgaggcntgcagtatctggagtcccggaagtgtatccaccgggacctggctgcccgcaatgtgctggtgactgaggacaatgtgatgaagattgctgactttgggctggcccgcggcgtccaccacattgactactataagaaaaccagcaacggccgcctgcctgtgaagtggatggcgcccgaggccttgtttgaccgggtgtacacacaccagagtgacgtgtggtcttttgggatcccgctatgggagatcttcaccctcgggggctccccgtatcctggcatcccggtggaggagctgttctcgctgctgcgggagggacatcggatggaccgacccccacactgccccccagagctgtacgggctgatgcgtgagtgctggcacgcagcgcccncccagaggcctaccttcaagcagctggtggaggcgctggacaaggtcctgctggccgtctctgaggagtacctcgacctccgcctgnccttcggaccctattccccctctggtggggacgccagcagcacctgctcctccagcgattctgtcttcagccacgaccccctgccattgggatccagctccttccccttcgggtctggggtgcagaca

SEQ ID NO: 40 - protein, 788 aa, Homo sapiens
  misc_feature (20)..(20): Wherein Xaa may be any naturally occurring amino acid
  misc_feature (21)..(21): Wherein Xaa may be any naturally occurring amino acid
  misc_feature (33)..(33): Wherein Xaa may be any naturally occurring amino acid
  misc_feature (74)..(74): Wherein Xaa may be any naturally occurring amino acid
  misc_feature (102)..(102): Wherein Xaa may be any naturally occurring amino acid
  misc_feature (131)..(131): Wherein Xaa may be any naturally occurring amino acid
  misc_feature (136)..(136): Wherein Xaa may be any naturally occurring amino acid
  misc_feature (252)..(252): Wherein Xaa may be any naturally occurring amino acid
  misc_feature (269)..(269): Wherein Xaa may be any naturally occurring amino acid
  misc_feature (283)..(283): Wherein Xaa may be any naturally occurring amino acid
  misc_feature (286)..(286): Wherein Xaa may be any naturally occurring amino acid
  misc_feature (297)..(297): Wherein Xaa may be any naturally occurring amino acid
  misc_feature (416)..(416): Wherein Xaa may be any naturally occurring amino acid
  misc_feature (422)..(422): Wherein Xaa may be any naturally occurring amino acid
  misc_feature (424)..(424): Wherein Xaa may be any naturally occurring amino acid
  misc_feature (427)..(427): Wherein Xaa may be any naturally occurring amino acid
  misc_feature (476)..(476): Wherein Xaa may be any naturally occurring amino acid
  misc_feature (537)..(537): Wherein Xaa may be any naturally occurring amino acid
  misc_feature (586)..(586): Wherein Xaa may be any naturally occurring amino acid
  misc_feature (665)..(665): Wherein Xaa may be any naturally occurring amino acid
  misc_feature (717)..(717): Wherein Xaa may be any naturally occurring amino acid
  misc_feature (746)..(746): Wherein Xaa may be any naturally occurring amino acid
MRLLLALLGVLLSVPGPPVXXLEASEEVELEPXLAPSLEQQEQELTVALGQPVRLCCGRAERGGHWYKEGSRLXPAGRVRGWRGRLEIASFLPEDAGRYLCXARGSMIVLQNLTLITGDSLTSSNDDEDPXSHRDXSNRHSYPQQAPYWTHPQRMEKKLHAVPAGNTVKFRCPAAGNPTPTIRWLKDGQAFHGENRIGGIRLRHQHWSLVMESVVPSDRGTYTCLVENAVGSIRYNYLLDVLERSPHRPILXAGLPANTTAVVGSDVEXLCKVYSDAQPHIQXLKXIVINGSSFGAXGFPYVQVLKTADINSSEVEVLYLRNVSAEDAGEYTCLAGNSIGLSYQSAWLTVLPVRGQRRTPHGPQQRPRPGIRTSSCTRRAPWPWLCSCCWPGCIEGRRSTAGTPARPPLCRSSPAXLWPDSXPXSQXLPASQAHPWYEACVSPPAAPPCSPASLVLGKPLGEGCFGQVVRAEAFGXDPARPDQASTVAVKMLKDNASDKDLADLVSEMEVMKLIGRHKNIINLLGVCTQEGPLYVIXCAAKGNLREFLRARRPPGPDLSPDGPRSSEGPLSFPVLVSCAYQVARGXQYLESRKCIHRDLAARNVLVTEDNVMKIADFGLARGVHHIDYYKKTSNGRLPVKWMAPEALFDRVYTHQSDVWSFGIPXWEIFTLGGSPYPGIPVEELFSLLREGHRMDRPPHCPPELYGLMRECWHAAPXQRPTFKQLVEALDKVLLAVSEEYLDLRLXFGPYSPSGGDASSTCSSSDSVFSHDPLPLGSSSFPFGSGVQT

SEQ ID NO: 41 - DNA, 1942 bp, Homo sapiens
  CDS (15)..(1742)
cgaacacctccaacatgaagcttcttcatgttttcctgttatttctgtgcttccacttaaggttttgcaaggtcacttatacatctcaagaggatctggtggagaaaaagtgcttagcaaaaaaatatactcacctctcctgcgataaagtcttctgccagccatggcagagatgcattgagggcacctgtgtttgtaaactaccgtatcagtgcccaaagaatggcactgcagtgtgtgcaactaacaggagaagcttcccaacatactgtcaacaaaagagtttggaatgtcttcatccagggacaaagtttttaaataacggaacatgcacagccgaaggaaagtttagtgtttccttgaagcatggaaatacagattcagagggaatagttgaagtaaaacttgtggaccaagataagacaatgttcatatgcaaaagcagctggagcatgagggaagccaacgtggcctgccttgaccttgggtttcaacaaggtgctgatactcaaagaaggtttaagttgtctgatctctctataaattccactgaatgtctacatgtgcattgccgaggattagagaccagtttggctgaatgtacttttactaagagaagaactatgggttaccaggatttcgctgatgtggtttgttatacacagaaagcagattctccaatggatgacttctttcagtgtgtgaatgggaaatacatttctcagatgaaagcctgtgatggtatcaatgattgtggagaccaaagtgatgaactgtgttgtaaagcatgccaaggcaaaggcttccattgcaaatcgggtgtttgcattccaagccagtatcaatgcaatggtgaggtggactgcattacaggggaagatgaagttggctgtgcagaagaaacagaaattttgactgctgacatggatgcagaaagaagacggataaaatcattattacctaaactatcttgtggagttaaaaacagaatgcacattcgaaggaaacgaattgtgggaggaaagcgagcacaactgggagacctcccatggcaggtggcaattaaggatgccagtggaatcacctgtgggggaatttatattggtggctgttggattctgactgctgcacattgtctcagagccagtaaaactcatcgttaccaaatatggacaacagtagtagactggatacaccccgaccttaaacgtatagtaattgaatacgtggatagaattattttccatgaaaactacaatgcaggcacttaccaaaatgacatcgctttgattgaaatgaaaaaagacggaaacaaaaaagattgtgagctgcctcgttccatccctgcctgtgtcccctggtctccttacctattccaacctaatgatacatgcatcgtttctggctggggacgagaaaaagataacgaaagagtcttttcacttcagtggggtgaagttaaactaataagcaactgctctaagttttacggaaatcgtttctatgaaaaagaaatggaatgtgcaggtacatatgatggttccatcgatgcctgtaaaggggactctggaggccccttagtctgtatggatgccaacaatgtgacttatgtctggggtgttgtgagttggggggaaaactgtggaaaaccagagttcccaggtttttacaccaaagtggccaattattttgactggattagctaccatgtaggaaggccttttatttctcagtacaatgtataaaattgtgatctctctcttcattctattctttttctctcaagagttccatttaatggaaataaaacggtataattaataattctctaggggggaaaaatgaagcaaatctcattggatatttttaaaggtctccacagagtttatgccatattggaattttgttgtataattctcaaataaatattttggtgaagcat

SEQ ID NO: 42 - protein, 576 aa, Homo sapiens
MKLLHVFLLFLCFHLRFCKVTYTSQEDLVEKKCLAKKYTHLSCDKVFCQPWQRCIEGTCVCKLPYQCPKNGTAVCATNRRSFPTYCQQKSLECLHPGTKFLNNGTCTAEGKFSVSLKHGNTDSEGIVEVKLVDQDKTMFICKSSWSMREANVACLDLGFQQGADTQRRFKLSDLSINSTECLHVHCRGLETSLAECTFTKRRTMGYQDFADVVCYTQKADSPMDDFFQCVNGKYISQMKACDGINDCGDQSDELCCKACQGKGFHCKSGVCIPSQYQCNGEVDCITGEDEVGCAEETEILTADMDAERRRIKSLLPKLSCGVKNRMHIRRKRIVGGKRAQLGDLPWQVAIKDASGITCGGIYIGGCWILTAAHCLRASKTHRYQIWTTVVDWIHPDLKRIVIEYVDRIIFHENYNAGTYQNDIALIEMKKDGNKKDCELPRSIPACVPWSPYLFQPNDTCIVSGWGREKDNERVFSLQWGEVKLISNCSKFYGNRFYEKEMECAGTYDGSIDACKGDSGGPLVCMDANNVTYVWGVVSWGENCGKPEFPGFYTKVANYFDWISYHVGRPFISQYNV

SEQ ID NO: 43 - DNA, 1674 bp, Homo sapiens
  CDS (1)..(1671)
atgaagcggccccgctgtggggtgccagaccagttcggggtacgagtgaaagccaacctgcggcggcgtcggaagcgctacgccctcaccgggaggaagtggaacaaccaccatctgacctttagcatccagaactacacggagaagttgggctggtaccactcgatggaggcggtgcgcagggccttccgcgtgtgggagcaggccacgcccctggtcttccaggaggtgccctatgaggacatccggctgcggcgacagaaggaggccgacatcatggaaacaacctcttcctggtggcagtgcatgagctgggccacgcgctggggctggagcactccagcaaccccaatgccatcatggcgccgttctaccagtggaaggacgttgacaacttcaagctgcccgaggacgatctccgtggcatccagcagctctacgcaacttggaaatgcagagtccaaaacgcctgaagccagggcctggagcctctgctggagcaggctggcatcccaaggggaatgtccccaaggggacatgcaggcagacaccctcaggagcacagtgacccaaggtaccccagacggtcagccacagcctacccagcctctccccactgtgacgccacggcggccaggccggcctgaccaccggccgccccggcctccccagccaccacccccaggtgggaagccagagcggcccccaaagccgggccccccagtccagccccgagccacagagcggcccgaccagtatggccccaacatctgcgacggggactttgacacagtggccatgcttcgcggggagatgttcgtgttcaagggccgctggttctggcgagtccggcacaaccgcgtcctggacaactatcccatgcccatcgggcacttctggcgtggtctgcccggtgacatcagtgctgcctacgagcgccaagacggtcgttttgtctttttcaaaggtgaccgctactggctctttcgagaagcgaacctggagcccggctacccacagccgctgaccagctatggcctgggcatcccctatgaccgcattgacacggccatctggtgggagcccacaggccacaccttcttcttccaagaggacaggtactggcgcttcaacgaggagacacagcgtggagaccctgggtaccccaagcccatcagtgtctggcaggggatccctgcctcccctaaaggggccttcctgagcaatgacgcagcctacacctacttctacaagggcaccaaatactggaaattcgacaatgagcgcctgcggatggagcccggctaccccaagtccatcctgcgggacttcatgggctgccaggagcacgtggagccaggcccccgatggcccgacgtggcccggccgcccttcaacccccacgggggtgcagagcccggggcggacagcgcagagggcgacgtgggggatggggatggggactttggggccggggtcaacaaggacgggggcagccgcgtggtggtgcagatggaggaggtggcacggacggtgaacgtggtgatggtgctggtgccactgctgctgctgctctgcgtcctgggcctcacctacgcgctggtgcagatgcagcgcaagggtgcgccacgtgtcctgctttactgcaagcgctcgctgcaggagtgggtctga

SEQ ID NO: 44 - protein, 557 aa, Homo sapiens
MKRPRCGVPDQFGVRVKANLRRRRKRYALTGRKWNNHHLTFSIQNYTEKLGWYHSMEAVRRAFRVWEQATPLVFQEVPYEDIRLRRQKEADIMETTSSWWQCMSWATRWGWSTPATPMPSWRRSTSGRTLTTSSCPRTISVASSSSTQLGNAESKTPEARAWSLCWSRLASQGECPQGDMQADTLRSTVTQGTPDGQPQPTQPLPTVTPRRPGRPDHRPPRPPQPPPPGGKPERPPKPGPPVQPRATERPDQYGPNICDGDFDTVAMLRGEMFVFKGRWFWRVRHNRVLDNYPMPIGHFWRGLPGDISAAYERQDGRFVFFKGDRYWLFREANLEPGYPQPLTSYGLGIPYDRIDTAIWWEPTGHTFFFQEDRYWRFNEETQRGDPGYPKPISVWQGIPASPKGAFLSNDAAYTYFYKGTKYWKFDNERLRMEPGYPKSILRDFMGCQEHVEPGPRWPDVARPPFNPHGGAEPGADSAEGDVGDGDGDFGAGVNKDGGSRVVVQMEEVARTVNVVMVLVPLLLLLCVLGLTYALVQMQRKGAPRVLLYCKRSLQEWV

SEQ ID NO: 45 - DNA, 3079 bp, Homo sapiens
  CDS (53)..(2548)
tagcccggcgctctcgccggccacacggagcggcgcccgggagctatgagccatgaagccgcccggcagcagctcgcggcagccgcccctggcgggctgcagccttgccggcgcttcctgcggcccccaacgcggccccgccggctcggtgcctgccagcgccccggcccgcacgccgccctgccgcctgcttctcgtccttctcctgctgcctccgctcgccgcctcgtcccggccccgcgcctggggggctgctgcgcccagcgctccgcattggaatgaaactgcagaaaaaaatttgggagtcctggcagatgaagacaatacattgcaacagaatagcagcagtaatatcagttacagcaatgcaatgcagaaagaaatcacactgccttcaagactcatatattacatcaaccaagactcggaaagcccttatcacgttcttgacacaaaggcaagacaccagcaaaaacataataaggctgtccatctggcccaggcaagcttccagattgaagccttcggctccaaattcattcttgacctcatactgaacaatggtttgttgtcttctgattatgtggagattcactacgaaaatgggaaaccacagtactctaagggtggagagcactgttactaccatggaagcatcagaggcgtcaaagactccaaggtggctctgtcaacctgcaatggacttcatggcatgtttgaagatgataccttcgtgtatatgatagagccactagagctggttcatgatgagaaaagcacaggtcgaccacatataatccagaaaaccttggcaggacagtattctaagcaaatgaagaatctcactatggaaagaggtgaccagtggccctttctctctgaattacagtggttgaaaagaaggaagagagcagtgaatccatcacgtggtatatttgaagaaatgaaatatttggaacttatgattgttaatgatcacaaaacgtataagaagcatcgctcttctcatgcacataccaacaactttgcaaagtccgtggtcaaccttgtggattctatttacaaggagcagctcaacaccagggttgtcctggtggctgtagagacctggactgagaaggatcagattgacatcaccaccaaccctgtgcagatgctccatgagttctcaaaataccggcagcgcattaagcagcatgctgatgctgtgcacctcatctcgcgggtgacatttcactataagagaagcagtctgagttactttggaggtgtctgttctcgcacaagaggagttggtgtgaatgagtatggtcttccaatggcagtggcacaagtattatcgcagagcctggctcaaaaccttggaatccaatgggaaccttctagcagaaagccaaaatgtgactgcacagaatcctggggtggctgcatcatggaggaaacaggggtgtcccattctcgaaaattttcaaagtgcagcattttggagtatagagactttttacagagaggaggtggagcctgccttttcaacaggccaacaaagctatttgagcccacggaatgtggaaatggatacgtggaagctggggaggagtgtgattgtggttttcatgtggaatgctatggattatgctgtaagaaatgttccctctccaacggggctcactgcagcgacgggccctgctgtaacaatacctcatgtctttttcagccacgagggtatgaatgccgggatgctgtgaacgagtgtgatattactgaatattgtactggagactctggtcagtgcccaccaaatcttcataagcaagacggatatgcatgcaatcaaaatcagggccgctgctacaatggcgagtgcaagaccagagacaaccagtgtcagtacatctggggaacaaaggctgcagggtctgacaagttctgctatgaaaagctgaatacagaaggcactgagaagggaaactgcgggaaggatggagaccggtggattcagtgcagcaaacatgatgtgttctgtggattcttactctgtaccaatcttactcgagctccacgtattggtcaacttcagggtgagatcattccaacttccttctaccatcaaggccgggtgattgactgcagtggtgcccatgtagttttagatgatgatacggatgtgggctatgtagaagatggaacgccatgtggcccgtctatgatgtgtttagatcggaagtgcctacaaattcaagccctaaatatgagcagctgtccactcgattccaagggtaaagtctgttcgggccatggggtgtgtagtaatgaagccacctgcatttgtgatttcacctgggcagggacagattgcagtatccgggatccagttaggaaccttcacccccccaaggatgaaggacccaaggtgaatatggccacaagcaggctaataggggccgtggccggcaccattctggccctgggggtgatttttggaggcacagggtggggaatagaaaatgtcaagaagagaaggttcgatcctactcagcaaggccccatctgaatcagctgcgctggatggacaccgccttgcactgttggattctgggtatgacatactcgcagcagtgttactggaactattaagtttgtaaacaaaacctttgggtggtaatgactacggagctaaagttggggtgacaaggatggggtaaaagaaaactgtctcttttggaaataatgtcaaagaacacctttcaccacctgtcagtaaacgggggagggggcaaaagaccatgctataaaaagaactgttccagaatcttttttttccctaatggacgaaggaacaacacacacacaaaaattaaatgcaataaaggaatcattaaaaaaaatagtaaatgattttttttccctcagcctgctggcacttaatatcttctaaatgatttggcatgatttttttttctttactaccgatgacaaactccagtggcatgaagatctaattttcaaaagggtaaaaactgcatggcatatatacaacaagctagcaagccaattctcagcaaaacctgcaacagaattc

SEQ ID NO: 46 - protein, 832 aa, Homo sapiens
MKPPGSSSRQPPLAGCSLAGASCGPQRGPAGSVPASAPARTPPCRLLLVLLLLPPLAASSRPRAWGAAAPSAPHWNETAEKNLGVLADEDNTLQQNSSSNISYSNAMQKEITLPSRLIYYINQDSESPYHVLDTKARHQQKHNKAVHLAQASFQIEAFGSKFILDLILNNGLLSSDYVEIHYENGKPQYSKGGEHCYYHGSIRGVKDSKVALSTCNGLHGMFEDDTFVYMIEPLELVHDEKSTGRPHIIQKTLAGQYSKQMKNLTMERGDQWPFLSELQWLKRRKRAVNPSRGIFEEMKYLELMIVNDHKTYKKHRSSHAHTNNFAKSVVNLVDSIYKEQLNTRVVLVAVETWTEKDQIDITTNPVQMLHEFSKYRQRIKQHADAVHLISRVTFHYKRSSLSYFGGVCSRTRGVGVNEYGLPMAVAQVLSQSLAQNLGIQWEPSSRKPKCDCTESWGGCIMEETGVSHSRKFSKCSILEYRDFLQRGGGACLFNRPTKLFEPTECGNGYVEAGEECDCGFHVECYGLCCKKCSLSNGAHCSDGPCCNNTSCLFQPRGYECRDAVNECDITEYCTGDSGQCPPNLHKQDGYACNQNQGRCYNGECKTRDNQCQYIWGTKAAGSDKFCYEKLNTEGTEKGNCGKDGDRWIQCSKHDVFCGFLLCTNLTRAPRIGQLQGEIIPTSFYHQGRVIDCSGAHVVLDDDTDVGYVEDGTPCGPSMMCLDRKCLQIQALNMSSCPLDSKGKVCSGHGVCSNEATCICDFTWAGTDCSIRDPVRNLHPPKDEGPKVNMATSRLIGAVAGTILALGVIFGGTGWGIENVKKRRFDPTQQGPI

SEQ ID NO: 47 - DNA, 1848 bp, Homo sapiens
  CDS (1)..(1845)
atgggactaagagcctctggaaaggactcagccccaacagtggtgtcagggatcctagggggttccgtgactctccccctaaacatctcagtagacacagagattgagaacgtcatctggattggtcccaaaaatgctcttgctttcgcacgtcccaaagaaaatgtaaccattatggtcaaaagctacctgggccgactagacatcaccaagtggagttactccctgtgcatcagcaatctgactctgaatgatgcaggatcctacaaagcccagataaaccaaaggaattttgaagtcaccactgaggaggaattcaccctgttcgtctatgagcagctgcaggagccccaagtcaccatgaagtctgtgaaggtgtctgagaacttctcctgtaacatcactctaatgtgctccgtgaagggggcagagaaaagtgttctgtacagctggaccccaagggaaccccatgcttctgagtccaatggaggctccattcttaccgtctcccgaacaccatgtgacccagacctgccatacatctgcacagcccagaaccccgtcagccagagaagctccctccctgtccatgttgggcagttctgtacagatccaggagcctccagaggaggaacaacgggggagactgtggtaggggtcctgggagagccagtcaccctgccacttgcactcccagcctgccgggacacagagaaggttgtctggttgtttaacacatccatcattagcaaagagagggaagaagcagcaacggcagatccactcattaaatccagggatccttacaagaacagggtgtgggtctccagccaggactgctccctgaagatcagccagctgaagatagaggacgccggcccctaccatgcctacgtgtgctcagaggcctccagcgtcaccagcatgacacatgtcaccctgctcatctaccgcaggctgaggaagcccaaaatcacgtggagcctcaggcacagtgaggatggcatctgcaggatcagcctgacctgctccgtggaggacgggggaaacactgtcatgtacacatggaccccgctgcagaaggaagctgttgtgtcccaaggggaatcacacctcaatgtctcatggagaagcagtgaaaatcaccccaacctcacatgcacagccagcaaccctgtcagcaggagttcccaccagtttctttctgagaacatctgttcaggacctgagagaaacacaaagctttggattgggttgttcctgatggtttgccttctgtgcgttgggatcttcagctggtgcatttggaagcgaaaaggacggtgttcagtcccagccttctgttccagccaagctgaggccccagcggatacaccagaacccacagctggccacacgctatactctgtgctctcccaaggatatgagaagctggacactcccctcaggcctgccaggcaacagcctacacccacctcagacggcagctctgacagcaacctcacaactgaggaggatgaggacaggcctgaggtgcacaagcccatcagtggaagatatgaggtatttgaccaggtcacccaggagggcgctggacatgacccagcccctgagggccaagcagactatgatcccgtcactccatatgtcacggaagttgagtctgtggttggagagaacaccatgtatgcacaagtgttcaacttacagggaaagaccccagtttctcagaaggaagagagctcagccacaatctactgctccatacggaaacctcaggtggtgccaccaccacaacagaatgatcttgagattcctgaaagtcctacctatgaaaatttcacctag

SEQ ID NO: 48 - protein, 615 aa, Homo sapiens
MGLRASGKDSAPTVVSGILGGSVTLPLNISVDTEIENVIWIGPKNALAFARPKENVTIMVKSYLGRLDITKWSYSLCISNLTLNDAGSYKAQINQRNFEVTTEEEFTLFVYEQLQEPQVTMKSVKVSENFSCNITLMCSVKGAEKSVLYSWTPREPHASESNGGSILTVSRTPCDPDLPYICTAQNPVSQRSSLPVHVGQFCTDPGASRGGTTGETVVGVLGEPVTLPLALPACRDTEKVVWLFNTSIISKEREEAATADPLIKSRDPYKNRVWVSSQDCSLKISQLKIEDAGPYHAYVCSEASSVTSMTHVTLLIYRRLRKPKITWSLRHSEDGICRISLTCSVEDGGNTVMYTWTPLQKEAVVSQGESHLNVSWRSSENHPNLTCTASNPVSRSSHQFLSENICSGPERNTKLWIGLFLMVCLLCVGIFSWCIWKRKGRCSVPAFCSSQAEAPADTPEPTAGHTLYSVLSQGYEKLDTPLRPARQQPTPTSDGSSDSNLTTEEDEDRPEVHKPISGRYEVFDQVTQEGAGHDPAPEGQADYDPVTPYVTEVESVVGENTMYAQVFNLQGKTPVSQKEESSATIYCSIRKPQVVPPPQQNDLEIPESPTYENFT

SEQ ID NO: 49 - DNA, 1581 bp, Homo sapiens
  CDS (1)..(1578)
atgggactaagagcctctggaaaggactcagccccaacagtggtgtcagggatcctagggggttccgtgactctccccctaaacatctcagtagacacagagattgagaacgtcatctggattggtcccaaaaatgctcttgctttcgcacgtcccaaagaaaatgtaaccattatggtcaaaagctacctgggccgactagacatcaccaagtggagttactccctgtgcatcagcaatctgactctgaatgatgcaggatcctacaaagcccagataaaccaaaggaattttgaagtcaccactgaggaggaattcaccctgttcgtctatgagcagctgcaggagccccaagtcaccatgaagtctgtgaaggtgtctgagaacttctcctgtaacatcactctaatgtgctccgtgaagggggcagagaaaagtgttctgtacagctggaccccaagggaaccccatgcttctgagtccaatggaggctccattcttaccgtctcccgaacaccatgtgacccagacctgccatacatctgcacagcccagaaccccgtcagccagagaagctccctccctgtccatgttgggcagttctgtacagatccaggagcctccagaggaggaacaacgggggagactgtggtaggggtcctgggagagccagtcaccctgccacttgcactcccagcctgccgggacacagagaaggttgtctggttgtttaacacatccatcattagcaaagagagggaagaagcagcaacggcagatccactcattaaatccagggatccttacaagaacagggtgtgggtctccagccaggactgctccctgaagatcagccagctgaagatagaggacgccggcccctaccatgcctacgtgtgctcagaggcctccagcgtcaccagcatgacacatgtcaccctgctcatctaccgacctgagagaaacacaaagctttggattgggttgttcctgatggtttgccttctgtgcgttgggatcttcagctggtgcatttggaagcgaaaaggacggtgttcagtcccagccttctgttccagccaagctgaggccccagcggatacaccagaacccacagctggccacacgctatactctgtgctctcccaaggatatgagaagctggacactcccctcaggcctgccaggcaacagcctacacccacctcagacagcagctctgacagcaacctcacaactgaggaggatgaggacaggcctgaggtgcacaagcccatcagtggaagatatgaggtatttgaccaggtcactcaggagggcgctggacatgacccagcccctgagggccaagcagactatgatcccgtcactccatatgtcacggaagttgagtctgtggttggagagaacaccatgtatgcacaagtgttcaacttacagggaaagaccccagtttctcaggaggaagagagctcagccacaatctactgctccatacggaaacctcaggtggtggtgccaccaccacaacagaatgatcttgagattcctgaaagtcctacctatgaaaatttcacctag

SEQ ID NO: 50 - protein, 526 aa, Homo sapiens
MGLRASGKDSAPTVVSGILGGSVTLPLNISVDTEIENVIWIGPKNALAFARPKENVTIMVKSYLGRLDITKWSYSLCISNLTLNDAGSYKAQINQRNFEVTTEEEFTLFVYEQLQEPQVTMKSVKVSENFSCNITLMCSVKGAEKSVLYSWTPREPHASESNGGSILTVSRTPCDPDLPYICTAQNPVSQRSSLPVHVGQFCTDPGASRGGTTGETVVGVLGEPVTLPLALPACRDTEKVVWLFNTSIISKEREEAATADPLIKSRDPYKNRVWVSSQDCSLKISQLKIEDAGPYHAYVCSEASSVTSMTHVTLLIYRPERNTKLWIGLFLMVCLLCVGIFSWCIWKRKGRCSVPAFCSSQAEAPADTPEPTAGHTLYSVLSQGYEKLDTPLRPARQQPTPTSDSSSDSNLTTEEDEDRPEVHKPISGRYEVFDQVTQEGAGHDPAPEGQADYDPVTPYVTEVESVVGENTMYAQVFNLQGKTPVSQEEESSATIYCSIRKPQVVVPPPQQNDLEIPESPTYENFT

SEQ ID NO: 51 - DNA, 375 bp, Homo sapiens
  CDS (1)..(375)
caccccatccctgactccagtcctctcctgcaattcgggggccaagtccggcagcggtacctctacacagatgatgcccagcagacagaagcccacctggagatcagggaggatgggacggtggggggcgctgctgaccagagccccgaaagtctcctgcagctgaaagccttgaagccgggagttattcaaatcttgggagtcaagacatccaggttcctgtgccagcggccagatggggccctgtatggatcgctccactttgaccctgaggcctgcagcttccgggagctgcttcttgaggacggatacaatgtttaccagtccgaagcccacggcctcccgctgcacctgccagggttacagaggaggctc

SEQ ID NO: 52 - protein, 125 aa, Homo sapiens
HPIPDSSPLLQFGGQVRQRYLYTDDAQQTEAHLEIREDGTVGGAADQSPESLLQLKALKPGVIQILGVKTSRFLCQRPDGALYGSLHFDPEACSFRELLLEDGYNVYQSEAHGLPLHLPGLQRRL

SEQ ID NO: 53 - DNA, 549 bp, Homo sapiens
  CDS (1)..(549)
caccccatccctgactccagtcctctcctgcaattcgggggccaagtccggcagcggtacctctacacagatgatgcccagcagacagaagcccacctggagatcagggaggatgggacggtggggggcgctgctgaccagagccccgaaagtctcctgcagctgaaagccttgaagccgggagttattcaaatcctgggagtcaagacatccaggttcctgtgccagcggccagatggggccctgtatggatcgctccactttgaccctgaggcctgcagcttccgggagctgcttcttgaggacggatacaatgtttaccagtccgaagcccacggcctcccgctgcacctgccagggaacaagtccccacaccgggaccctgcaccccgaggaccagctcgcttcctgccactaccaggcctgccccccgcactcccggagccacccggaatcctggccccccagccccccgatgtgggctcctcggaccctctgagcatggtgggattcccagggccgaagccccagctacgcttccctcgaggg

SEQ ID NO: 54 - protein, 183 aa, Homo sapiens
HPIPDSSPLLQFGGQVRQRYLYTDDAQQTEAHLEIREDGTVGGAADQSPESLLQLKALKPGVIQILGVKTSRFLCQRPDGALYGSLHFDPEACSFRELLLEDGYNVYQSEAHGLPLHLPGNKSPHRDPAPRGPARFLPLPGLPPALPEPPGILAPQPPDVGSSDPLSMVGFPGPKPQLRFPRG

SEQ ID NO: 55 - DNA, 643 bp, Homo sapiens
  CDS (9)..(635)
agccattgatggactcggacgagaccgggttcgagcactcaggactgtgggtttctgtgctggctggtcttctgctgggagcctgccaggcacaccccatccctgactccagtcctctcctgcaattcgggggccaagtccggcagcggtacctctacacagatgatgcccagcagacagaagcccacctggagatcagggaggatgggacggtggggggcgctgctgaccagagccccgaaagtctcctgcagctgaaagccttgaagccgggagttattcaaatcttgggagtcaagacatccaggttcctgtgccagcggccagatggggccccgtatggatcgctccactttgaccctgaggcctgcagcttccgggagctgcttcttgaggacggatacaatgtttaccagtccgaagcccacggcctcccgctgcacctgccagggaacaagtccccacaccgggaccctgcaccccgaggaccagctcgcttcctgccactaccaggcctgccccccgcactcccggagccacccggaatcctggccccccagccccccgatgtgggctcctcggaccctctgagcatggtgggaccttcccagggccgaagccccagctacgcttcctgaagcca

SEQ ID NO: 56 - protein, 209 aa, Homo sapiens
MDSDETGFEHSGLWVSVLAGLLLGACQAHPIPDSSPLLQFGGQVRQRYLYTDDAQQTEAHLEIREDGTVGGAADQSPESLLQLKALKPGVIQILGVKTSRFLCQRPDGAPYGSLHFDPEACSFRELLLEDGYNVYQSEAHGLPLHLPGNKSPHRDPAPRGPARFLPLPGLPPALPEPPGILAPQPPDVGSSDPLSMVGPSQGRSPSYAS

SEQ ID NO: 57 - DNA, 643 bp, Homo sapiens
  CDS (9)..(635)
agccattgatggactcggacgagaccgggttcgagcactcaggactgtgggtttctgtgctggctggtcttctgctgggagcctgccaggcacaccccatccctgactccagtcctctcctgcaattcgggggccaagtccggcagcggtacctctacacagatgatgcccagcagacagaagcccacctggagatcagggaggatgggacggtggggggcgctgctgaccagagccccgaaagtctcctgcagctgaaagccttgaagccgggagttattcaaatcttgggagtcaagacatccgggttcctgtgccagcggccagatggggccctgtatggatcgctccactttgaccctgaggcctgcagcttccgggagctgcttcttgaggacggatacaatgtttaccagtccgaagcccacggcctcccgctgcacctgccagggaacaagtccccacaccgggaccctgcaccccgaggaccagctcgcttcctgccactaccaggcctgccccccgcactcccggagccacccggaatcctggccccccagccccccgatgtgggctcctcggaccctctgagcatggtgggaccttcccagggccgaagccccagctacgcttcctgaagcca

SEQ ID NO: 58 - protein, 209 aa, Homo sapiens
MDSDETGFEHSGLWVSVLAGLLLGACQAHPIPDSSPLLQFGGQVRQRYLYTDDAQQTEAHLEIREDGTVGGAADQSPESLLQLKALKPGVIQILGVKTSGFLCQRPDGALYGSLHFDPEACSFRELLLEDGYNVYQSEAHGLPLHLPGNKSPHRDPAPRGPARFLPLPGLPPALPEPPGILAPQPPDVGSSDPLSMVGPSQGRSPSYAS

SEQ ID NO: 59 - DNA, 643 bp, Homo sapiens
  CDS (9)..(281)
agccattgatggactcggacgagaccgggttcgagcactcaggactgtgggtttctgtgctggctggtcttctgctgggagcctgccaggcacaccccatccctgactccagtcctctcctgcaattcgggggccaagtccggcagcggtacctctacacagatgatgcccagcagacagaagcccacctggagatcagggaggatgggacggtggggggcgctgctgaccagagccccgaaagtctcctgcagctgaaagccttgaagccgggagttatttaaatcttgggagtcaagacatccaggttcctgtgccagcggccagatggggccctgtatggatcgctccactttgaccctgaggcctgcagcttccgggagctgcttcttgaggacggatacaatgtttaccagtccgaagcccacggcctcccgctgcacctgccagggaacaagtccccacaccgggaccctgcaccccgaggaccagctcgcttcctgccactaccaggcctgccccccgcactcccggagccacccggaatcctggccccccagccccccgatgtgggctcctcggaccctctgagcatggtgggaccttcccagggccgaagccccagctacgcttcctgaagcca

SEQ ID NO: 60 - protein, 91 aa, Homo sapiens
MDSDETGFEHSGLWVSVLAGLLLGACQAHPIPDSSPLLQFGGQVRQRYLYTDDAQQTEAHLEIREDGTVGGAADQSPESLLQLKALKPGVI

SEQ ID NO: 61 - DNA, 643 bp, Homo sapiens
  CDS (9)..(635)
agccattgatggactcggacgagaccgggttcgagcactcaggactgtgggtttctgtgctggctggtcttctgctgggagcctgccaggcacaccccatccctgactccagtcctctcctgcaattcgggggccaagtccggcagcggtacctctacacagatgatgcccggcagacagaagcccacctggagatcagggaggatgggacggtggggggcgctgctgaccagagccccgaaagtctcctgcagctgaaagccttgaagccgggagttattcaaatcttgggagtcaagacatccaggttcctgtgccagcggccagatggggccctgtatggatcgctccactttgaccctgaggcctgcagcttccgggagctgcttcttgaggacggatacaatgtttaccagtccgaagcccacggcctcccgctgcacctgccagggaacaagtccccacaccgggaccctgcaccccgaggaccagctcgcttcctgccactaccaggcctgccccccgcactcccggagccacccggaatcctggccccccagccccccgatgtgggctcctcggaccctctgagcatggtgggaccttcccagggccgaagccccagctacgcttcctgaagcca

SEQ ID NO: 62 - protein, 209 aa, Homo sapiens
MDSDETGFEHSGLWVSVLAGLLLGACQAHPIPDSSPLLQFGGQVRQRYLYTDDARQTEAHLEIREDGTVGGAADQSPESLLQLKALKPGVIQILGVKTSRFLCQRPDGALYGSLHFDPEACSFRELLLEDGYNVYQSEAHGLPLHLPGNKSPHRDPAPRGPARFLPLPGLPPALPEPPGILAPQPPDVGSSDPLSMVGPSQGRSPSYAS

SEQ ID NO: 63 - DNA, 643 bp, Homo sapiens
  CDS (9)..(635)
agccattgatggactcggacgagaccgggttcgagcactcaggactgtgggtttctgtgctggctggtcctctgctgggagcctgccaggcacaccccatccctgactccagtcctctcctgcaattcgggggccaagtccggcagcggtacctctacacagatgatgcccagcagacagaagcccacctggagatcagggaggatgggacggtggggggcgctgctgaccagagccccgaaagtctcctgcagctgaaagccttgaagccgggagttattcaaatcttgggagtcaagacatccaggttcctgtgccagcggccagatggggccctgtatggatcgctccactttgaccctgaggcctgcagcttccgggagctgcttcttgaggacggatacaatgtttaccagtccgaagcccacggcctcccgctgcacctgccagggaacaagtccccacaccgggaccctgcaccccgaggaccagctcgcttcctgccactaccaggcctgccccccgcactcccggagccacccggaatcctggccccccagccccccgatgtgggctcctcggaccctctgagcatggtgggaccttcccagggccgaagccccagctacgcttcctgaagcca

SEQ ID NO: 64 - protein, 209 aa, Homo sapiens
MDSDETGFEHSGLWVSVLAGPLLGACQAHPIPDSSPLLQFGGQVRQRYLYTDDAQQTEAHLEIREDGTVGGAADQSPESLLQLKALKPGVIQILGVKTSRFLCQRPDGALYGSLHFDPEACSFRELLLEDGYNVYQSEAHGLPLHLPGNKSPHRDPAPRGPARFLPLPGLPPALPEPPGILAPQPPDVGSSDPLSMVGPSQGRSPSYAS

SEQ ID NO: 65 - DNA, 643 bp, Homo sapiens
  CDS (9)..(635)
agccattgatggactcggacgagaccgggttcgagcactcaggactgtgggtttctgcgctggctggtcttctgctgggagcctgccaggcacaccccatccctgactccagtcctctcctgcaattcgggggccaagtccggcagcggtacctctacacagatgatgcccagcagacagaagcccacctggagatcagggaggatgggacggtggggggcgctgctgaccagagccccgaaagtctcctgcagctgaaagccttgaagccgggagttattcaaatcttgggagtcaagacatccaggttcctgtgccagcggccagatggggccctgtatggatcgctccactttgaccctgaggcctgcagcttccgggagctgcttcttgaggacggatacaatgtttaccagtccgaagcccacggcctcccgctgcacctgccagggaacaagtccccacaccgggaccctgcaccccgaggaccagctcgcttcctgccactaccaggcctgccccccgcactcccggagccacccggaatcctggccccccagccccccgatgtgggctcctcggaccctctgagcatggtgggaccttcccagggccgaagccccagctacgcttcctgaagcca

SEQ ID NO: 66 - protein, 209 aa, Homo sapiens
MDSDETGFEHSGLWVSALAGLLLGACQAHPIPDSSPLLQFGGQVRQRYLYTDDAQQTEAHLEIREDGTVGGAADQSPESLLQLKALKPGVIQILGVKTSRFLCQRPDGALYGSLHFDPEACSFRELLLEDGYNVYQSEAHGLPLHLPGNKSPHRDPAPRGPARFLPLPGLPPALPEPPGILAPQPPDVGSSDPLSMVGPSQGRSPSYAS

SEQ ID NO: 67 - DNA, 643 bp, Homo sapiens
  CDS (9)..(635)
agccattgatggactcggacgagatcgggttcgagcactcaggactgtgggtttctgtgctggctggtcttctgctgggagcctgccaggcacaccccatccctgactccagtcctctcctgcaattcgggggccaagtccggcagcggtacctctacacagatgatgcccagcagacagaagcccacctggagatcagggaggatgggacggtggggggcgctgctgaccagagccccgaaagtctcctgcagctgaaagccttgaagccgggagttattcaaatcttgggagtcaagacatccaggttcctgtgccagcggccagatggggccctgtatggatcgctccactttgaccctgaggcctgcagcttccgggagctgcttcttgaggacggatacaatgtttaccagtccgaagcccacggcctcccgctgcacctgccagggaacaagtccccacaccgggaccctgcaccccgaggaccagctcgcttcctgccactaccaggcctgccccccgcactcccggagccacccggaatcctggccccccagccccccgatgtgggctcctcggaccctctgagcatggtgggaccttcccagggccgaagccccagctacgcttcctgaagcca

SEQ ID NO: 68 - protein, 209 aa, Homo sapiens
MDSDEIGFEHSGLWVSVLAGLLLGACQAHPIPDSSPLLQFGGQVRQRYLYTDDAQQTEAHLEIREDGTVGGAADQSPESLLQLKALKPGVIQILGVKTSRFLCQRPDGALYGSLHFDPEACSFRELLLEDGYNVYQSEAHGLPLHLPGNKSPHRDPAPRGPARFLPLPGLPPALPEPPGILAPQPPDVGSSDPLSMVGPSQGRSPSYAS

SEQ ID NO: 69 - DNA, 643 bp, Homo sapiens
  CDS (9)..(635)
agccattgatggactcggacgaggccgggttcgagcactcaggactgtgggtttctgtgctggctggtcttctgctgggagcctgccaggcacaccccatccctgactccagtcctctcctgcaattcgggggccaagtccggcagcggtacctctacacagatgatgcccagcagacagaagcccacctggagatcagggaggatgggacggtggggggcgctgctgaccagagccccgaaagtctcctgcagctgaaagccttgaagccgggagttattcaaatcttgggagtcaagacatccaggttcctgtgccagcggccagatggggccctgtatggatcgctccactttgaccctgaggcctgcagcttccgggagctgcttcttgaggacggatacaatgtttaccagtccgaagcccacggcctcccgctgcacctgccagggaacaagtccccacaccgggaccctgcaccccgaggaccagctcgcttcctgccactaccaggcctgccccccgcactcccggagccacccggaatcctggccccccagccccccgatgtgggctcctcggaccctctgagcatggtgggaccttcccagggccgaagccccagctacgcttcctgaagcca

SEQ ID NO: 70 - protein, 209 aa, Homo sapiens
MDSDEAGFEHSGLWVSVLAGLLLGACQAHPIPDSSPLLQFGGQVRQRYLYTDDAQQTEAHLEIREDGTVGGAADQSPESLLQLKALKPGVIQILGVKTSRFLCQRPDGALYGSLHFDPEACSFRELLLEDGYNVYQSEAHGLPLHLPGNKSPHRDPAPRGPARFLPLPGLPPALPEPPGILAPQPPDVGSSDPLSMVGPSQGRSPSYAS

SEQ ID NO: 71 - DNA, 643 bp, Homo sapiens
  CDS (9)..(635)
agccattgatggactcggacgagaccgggttcgagcactcaggactgtgggtttctgtgctggctggtcttctgctgggagcctgccaggcacaccccatccctgactccagtcctctcctgcaattcgggggccaagtccggcagcggtacctctacacagatgatgcccagcagacagaagcccacctggagatcagggaggatgggacggtggggggcgctgctgaccagagccccgaaagtctcctgcagctgaaagccttgaagccgggagttattcaaatcttgggagtcaagacatccaggttcctgtgccagcggccagatggggccctgtatggatcgctccactttgaccctgaggcctgcagcttccgggagctgcttcttgaggacggatacaatgtttaccagtccgaagcccacggcctcccgctgcaccagccagggaacaagtccccacaccgggaccctgcaccccgaggaccagctcgcttcctgccactaccaggcctgccccccgcactcccggagccacccggaatcctggccccccagccccccgatgtgggctcctcggaccctctgagcatggtgggaccttcccagggccgaagccccagctacgcttcctgaagcca

SEQ ID NO: 72 - protein, 209 aa, Homo sapiens
MDSDETGFEHSGLWVSVLAGLLLGACQAHPIPDSSPLLQFGGQVRQRYLYTDDAQQTEAHLEIREDGTVGGAADQSPESLLQLKALKPGVIQILGVKTSRFLCQRPDGALYGSLHFDPEACSFRELLLEDGYNVYQSEAHGLPLHQPGNKSPHRDPAPRGPARFLPLPGLPPALPEPPGILAPQPPDVGSSDPLSMVGPSQGRSPSYAS

SEQ ID NO: 73 - DNA, 643 bp, Homo sapiens
  CDS (9)..(635)
agccattgatggactcggacgagaccgggttcgagcactcaggactgtgggtttctgtgctggctggtcttctgctgggagcctgccaggcacaccccatccctgactccagtcctctcctgcaattcgggggccaagtccggcagcggtacctctacacagatgatgcccagcagacagaagcccacctggagatcagggaggatgggacggtggggggcgctgctgaccagagccccgaaagtctcctgcagctgaaagccttgaagccgggagttattcaaatcttgggagtcaagacatccaggttcctgtgccagcggccagatggggccctgtatggatcgctccactttgaccctgaggcctgcagcttccgggagctgcttcttgaggacggatacaatgtttaccagtccgaagcccacggcctcccgctgcacctgccagggaacaagtccccacaccgggaccctgcaccccgaggaccagctcgcttcctgccactaccaggccagccccccgcactcccggagccacccggaatcctggccccccagccccccgatgtgggctcctcggaccctctgagcatggtgggaccttcccagggccgaagccccagctacgcttcctgaagcca

SEQ ID NO: 74 - protein, 209 aa, Homo sapiens
MDSDETGFEHSGLWVSVLAGLLLGACQAHPIPDSSPLLQFGGQVRQRYLYTDDAQQTEAHLEIREDGTVGGAADQSPESLLQLKALKPGVIQILGVKTSRFLCQRPDGALYGSLHFDPEACSFRELLLEDGYNVYQSEAHGLPLHLPGNKSPHRDPAPRGPARFLPLPGQPPALPEPPGILAPQPPDVGSSDPLSMVGPSQGRSPSYAS

SEQ ID NO: 75 - DNA, 643 bp, Homo sapiens
  misc_feature (24)..(24): Wherein n may be a, c, g or t
  misc_feature (25)..(25): Wherein n may be a, c, g or t
  misc_feature (58)..(58): Wherein n may be a, c, g or t
  misc_feature (70)..(70): Wherein n may be a, c, g or t
  misc_feature (172)..(172): Wherein n may be a, c, g or t
  misc_feature (282)..(282): Wherein n may be a, c, g or t
  misc_feature (306)..(306): Wherein n may be a, c, g or t
  misc_feature (337)..(337): Wherein n may be a, c, g or t
  misc_feature (445)..(445): Wherein n may be a, c, g or t
  misc_feature (517)..(517): Wherein n may be a, c, g or t
agccattgatggactcggacgagnncgggttcgagcactcaggactgtgggtttctgngctggctggtcntctgctgggagcctgccaggcacaccccatccctgactccagtcctctcctgcaattcgggggccaagtccggcagcggtacctctacacagatgatgcccngcagacagaagcccacctggagatcagggaggatgggacggtggggggcgctgctgaccagagccccgaaagtctcctgcagctgaaagccttgaagccgggagttattnaaatcttgggagtcaagacatccnggttcctgtgccagcggccagatggggcccngtatggatcgctccactttgaccctgaggcctgcagcttccgggagctgcttcttgaggacggatacaatgtttaccagtccgaagcccacggcctcccgctgcaccngccagggaacaagtccccacaccgggaccctgcaccccgaggaccagctcgcttcctgccactaccaggccngccccccgcactcccggagccacccggaatcctggccccccagccccccgatgtgggctcctcggaccctctgagcatggtgggaccttcccagggccgaagccccagctacgcttcctgaagcca

SEQ ID NO: 76 - protein, 209 aa, Homo sapiens
  misc_feature (17)..(17): Wherein Xaa may be any naturally occurring amino acid
  misc_feature (21)..(21): Wherein Xaa may be any naturally occurring amino acid
  misc_feature (92)..(92): Wherein Xaa may be any naturally occurring amino acid
  misc_feature (110)..(110): Wherein Xaa may be any naturally occurring amino acid
  misc_feature (146)..(146): Wherein Xaa may be any naturally occurring amino acid
MDSDENGFEHSGLWVSXLAGXLLGACQAHPIPDSSPLLQFGGQVRQRYLYTDDANQTEAHLEIREDGTVGGAADQSPESLLQLKALKPGVIXILGVKTSNFLCQRPDGAXYGSLHFDPEACSFRELLLEDGYNVYQSEAHGLPLHXPGNKSPHRDPAPRGPARFLPLPGNPPALPEPPGILAPQPPDVGSSDPLSMVGPSQGRSPSYAS

SEQ ID NO: 77 - DNA, 1788 bp, Homo sapiens
  CDS (1)..(1788)
gaagaacttccaaactacctggtgacattaccagcccggctaaatttcccctccgttcagaaggtttgtttggacctgagccctgggtacagtgatgttaaattcacggttactctggagaccaaggacaagacccagaagttgctagaatactctggactgaagaagaggcacttacattgtatctcctttcttgtaccacctcctgctggtggcacagaagaagtggccacaatccgggtgtcgggagttggaaataacatcagctttgaggagaagaaaaaggttctaattcagaggcaggggaacggcacctttgtacagactgacaaacctctctacaccccagggcagcaagtgtatttccgcattgtcaccatggatagcaacttcgttccagtgaatgacaagtactccatggtggaactacaggatccaaatagcaacaggattgcacagtggctggaagtggtacctgagcaaggcattgtagacctgtccttccaactggcaccagaggcaatgctgggcacctacactgtggcagtggctgagggcaagacctttggtactttcagtgtggaggaatatgtgctgccgaagtttaaggtggaagtggtggaacccaaggagttatcaacggtgcaggaatctttcttagtaaaaatttgttgtaggtacacctatggaaagcccatgctaggggcagtgcaggtatctgtgtgtcagaaggcaaatacttactggtatcgagaggtggaacgggaacagcttcctgacaaatgcaggaacctctctggacagactgacaaaacaggatgtttctcagcacctgtggacatggccacctttgacctcattggatatgcgtacagccatcaaatcaatattgtggctactgttgtggaggaagggacaggtgtggaggccaatgccactcagaatatctacatttctccacaaatgggatcaatgacctttgaagacaccagcaatttttaccatccaaatttccccttcagtgggaagataagagttaggggccatgatgactccttcctcaagaaccatctagtgtttctggtgatttatggcacaaatggaaccttcaaccagaccctggttactgataacaatggcctagctccctttaccttggagacatccggttggaatgggacagacgtttctctggagggaaagtttcaaatggaagacttagtatataatccggaacaagtgccacgttactaccaaaatgcctacctgcacctgcgacccttctacagcacaacccgcagcttccttggcatccaccggctaaacggccccttgaaatgtggccagccccaggaagtgctggtggattattacatcgacccggccgatgcaagccctgaccaagagatcagcttctcctactatttaatagggaaaggaagtttggtgatggaggggcagaaacacctgaactctaagaagaaaggactgaaagcccccttctctctctcactgaccttcacttcgagactggcccctgatccttccctggtgatctatgccatttttcccagtggaggtgttgtagctgacaaaattcagttctcagtcgagatgtgctttgacaatcaggtttcccttggcttctccccctcccagcagcttccaggagcagaagtggagctgcagctgcaggcagctcccggatccctgtgtgcgctccgggcggtggatgagagtgtcttactgcttaggccagacagagagctgagcaaccgctctgtctat

SEQ ID NO: 78 - protein, 596 aa, Homo sapiens
EELPNYLVTLPARLNFPSVQKVCLDLSPGYSDVKFTVTLETKDKTQKLLEYSGLKKRHLHCISFLVPPPAGGTEEVATIRVSGVGNNISFEEKKKVLIQRQGNGTFVQTDKPLYTPGQQVYFRIVTMDSNFVPVNDKYSMVELQDPNSNRIAQWLEVVPEQGIVDLSFQLAPEAMLGTYTVAVAEGKTFGTFSVEEYVLPKFKVEVVEPKELSTVQESFLVKICCRYTYGKPMLGAVQVSVCQKANTYWYREVEREQLPDKCRNLSGQTDKTGCFSAPVDMATFDLIGYAYSHQINIVATVVEEGTGVEANATQNIYISPQMGSMTFEDTSNFYHPNFPFSGKIRVRGHDDSFLKNHLVFLVIYGTNGTFNQTLVTDNNGLAPFTLETSGWNGTDVSLEGKFQMEDLVYNPEQVPRYYQNAYLHLRPFYSTTRSFLGIHRLNGPLKCGQPQEVLVDYYIDPADASPDQEISFSYYLIGKGSLVMEGQKHLNSKKKGLKAPFSLSLTFTSRLAPDPSLVIYAIFPSGGVVADKIQFSVEMCFDNQVSLGFSPSQQLPGAEVELQLQAAPGSLCALRAVDESVLLLRPDRELSNRSVY

SEQ ID NO: 79 - DNA, 4492 bp, Homo sapiens
  CDS (1)..(4374)
atgtgggctcagctccttctaggaatgttggccctatcaccagccattgcagaagaacttccaaactacctggtgacattaccagcccggctaaatttcccctccgttcagaaggtttgtttggacctgagccctgggtacagtgatgttaaattcacggttactctggagaccaaggacaagacccagaagttgctagaatactctggactgaagaagaggcacttacattgtatctcctttcttgtaccacctcctgctggtggcacagaagaagtggccacaatccgggtgtcgggagttggaaataacatcagctttgaggagaagaaaaaggttctaattcagaggcaggggaacggcacctttgtacagactgacaaacctctctacaccccagggcagcaagtgtatttccgcattgtcaccatggatagcaacttcgttccagtgaatgacaagtactccatggtggaactacaggatccaaatagcaacaggattgcacagtggctggaagtggtacctgagcaaggcattgtagacctgtccttccaactggcaccagaggcaatgctgggcacctacactgtggcagtggctgagggcaagacctttggtactttcagtgtggaggaatatgtgctttctccatttctccttttactctcttcagtgctgccgaagtttaaggtggaagtggtggaacccaaggagttatcaacggtgcaggaatctttcttagtaaaaatttgttgtaggtacacctatggaaagcccatgctaggggcagtgcaggtatctgtgtgtcagaaggcaaatacttactggtatcgagaggtggaacgggaacagcttcctgacaaatgcaggaacctctctggacagactgacaaaacaggatgtttctcagcacctgtggacatggccacctttgacctcattggatatgcgtacagccatcaaatcaatattgtggctactgttgtggaggaagggacaggtgtggaggccaatgccactcagaatatctacacttctccacaaatgggatcaatgacctttgaagacaccagcaatttttaccatccaaatttccccttcagtgggaagatgctgctcaagtttccgcaaggcggtgtgctcccttgcaagaaccatctagtgtttctggtgatttatggcacaaatggaaccttcaaccagaccctggttactgataacaatggcctagctccctttaccttggagacatccggttggaatgggacagacgtttctctggagggaaagtttcaaatggaagacttagtatataatccggaacaagtgccacgttactaccaaaatgcctacctgcacctgcgacccttctacagcacaacccgcagcttccttggcatccaccggctaaacggccccttgaaatgtggccagccccaggaagtgctggtggattattacatcgacccggccgatgcaagccctgaccaagagatcagcttctcctactatttaatagggaaaggaagtttggtgatggaggggcagaaacacctgaactctaagaagaaaggactgaaagcctccttctctctctcactgaccttcacttcgagactggcccctgatccttccctggtgatctatgccatttttcccagtggaggtgttgtagctgacaaaattcagttctcagtcgagatgtgctttgacaatcagcagcttccaggagcagaagtggagctgcagctgcaggcagctcccggatccctgtgtgcgctccgggcggtggatgagagtgtcttactgcttaggccagacagagagctgagcaaccgctctgtctatgggatgtttccattctggtatggtcactacccctatcaagtggctgagtatgatcagtgtccagtgtctggcccatgggactttcctcagcccctcattgacccaatgccccaagggcattcgagccagcgttccattatctggaggccctcgttctctgaaggcacggaccttttcagctttttccgggacgtgggcctgaaaatactgtccaatgccaaaatcaagaagccagtagattgcagtcacagatctccagaatacagcactgctatgggtggcggtggtcatccagaggcttttgagtcatcaactcctttacatcaagcagaggattctcaggtccgccagtacttcccagagacctggctctgggatctgtttcctattggtaactcggggaaggaggcggtccacgtcacagttcctgacgccatcaccgagtggaaggcgatgagtttctgcacttcccagtcaagaggcttcgggctttcacccactgttggactaactgctttcaagccgttctttgttgacctgactctcccttactcagtagtccgtggggaatcctttcgtcttactgccaccatcttcaattacctaaaggattgcatcagggttcagactgacctggctaaatcgcatgagtaccagctagaatcatgggcagattctcagacctccagttgtctctgtgctgatgacgcaaaaacccaccactggaacatcacagctgtcaaattgggtcacattaactttactattagtacaaagattctggacagcaatgaaccatgtgggggccagaaggggtttgttccccaaaagggccgaagtgacacgctcatcaagccagttctcgtcaaacctgagggagtcctggtggagaagacacacagctcattgctgtgcccaaaaggaggaaaggtggcatctgaatctgtctccctggagctcccagtggacattgttcctgactcgaccaaggcttatgttacggttctgggagacattatgggcacagccctgcagaacctggatggtctggtgcagatgcccagtggctgtggcgagcagaacatggtcttgtttgctcccatcatctatgtcttgcagtacctggagaaggcagggctgctgacggaggagatcaggtctcgggcagtgggtttcctggaaatagggtaccagaaggagctgatgtacaaacacagcaatggctcatacagtgcctttggggagcgagatggaaatggaaacacatggctgacagcgtttgtcacaaaatgctttggccaagctcagaaattcatcttcattgatcccaagaacatccaggatgctctcaagtggatggcaggaaaccagctccccagtggctgctatgccaacgtgggaaatctccttcacacagctatgaagggtggtgttgatgatgaggtctccttgactgcgtatgtcacagctgcattgctggagatgggaaaggatgtagatgacccaatggtgagtcagggtctacggtgtctcaagaattcggccacctccacgaccaacctctacacacaggccctgttggcttacattttctccctggctggggaaatggacatcagaaacattctccttaaacagttagatcaacaggctatcatctcaggagaatccatttactggagccagaaacctactccatcatcgaacgccagcccttggtctgagcctgcggctgtagatgtggaactcacagcatatgcattgttggcccagcttaccaagcccagcctgactcaaaaggagatagcgaaggccactagcatagtggcttggttggccaagcaacacaatgcatatgggggcttctcttctactcaggatactgtagttgctctccaagctcttgccaaatatgccactaccgcctacatgccatctgaggagatcaacctggttgtaaaatccactgagaatttccagcgcacattcaacatacagtcagttaacagattggtatttcagcaggataccctgcccaatgtccctggaatgtacacgttggaggcctcaggccagggctgtgtctatgtgcagacggtgttgagatacaatattctccctcccacaaatatgaagacctttagtcttagtgtggaaataggaaaagctagatgtgagcagccgacttcacctcgatccttgactctcactattcacaccagttatgtggggagccgtagctcttccaatatggctattgtggaagtgaagatgctatctgggttcagtcccatggagggcaccaatcagttacttctccagcaacccctggtgaagaaggttgaatttggaactgacacacttaacatttacttggatgagctcattaagaacactcagacttacaccttcaccatcagccaaagtgtgctggtcaccaacttgaaaccagcaaccatcaaggtctatgactactacctaccagatgaacaggcaacaattcagtattctgatccctgtgaatgaggataggagctggaaactcaattagtcctctgtgacatttactggagggtggaacattcttctgtcgcttgaagcagaactcattcaatcaaataatttaatttctctgactagt

SEQ ID NO: 80 - protein, 1458 aa, Homo sapiens
MWAQLLLGMLALSPAIAEELPNYLVTLPARLNFPSVQKVCLDLSPGYSDVKFTVTLETKDKTQKLLEYSGLKKRHLHCISFLVPPPAGGTEEVATIRVSGVGNNISFEEKKKVLIQRQGNGTFVQTDKPLYTPGQQVYFRIVTMDSNFVPVNDKYSMVELQDPNSNRIAQWLEVVPEQGIVDLSFQLAPEAMLGTYTVAVAEGKTFGTFSVEEYVLSPFLLLLSSVLPKFKVEVVEPKELSTVQESFLVKICCRYTYGKPMLGAVQVSVCQKANTYWYREVEREQLPDKCRNLSGQTDKTGCFSAPVDMATFDLIGYAYSHQINIVATVVEEGTGVEANATQNIYTSPQMGSMTFEDTSNFYHPNFPFSGKMLLKFPQGGVLPCKNHLVFLVIYGTNGTFNQTLVTDNNGLAPFTLETSGWNGTDVSLEGKFQMEDLVYNPEQVPRYYQNAYLHLRPFYSTTRSFLGIHRLNGPLKCGQPQEVLVDYYIDPADASPDQEISFSYYLIGKGSLVMEGQKHLNSKKKGLKASFSLSLTFTSRLAPDPSLVIYAIFPSGGVVADKIQFSVEMCFDNQQLPGAEVELQLQAAPGSLCALRAVDESVLLLRPDRELSNRSVYGMFPFWYGHYPYQVAEYDQCPVSGPWDFPQPLIDPMPQGHSSQRSIIWRPSFSEGTDLFSFFRDVGLKILSNAKIKKPVDCSHRSPEYSTAMGGGGHPEAFESSTPLHQAEDSQVRQYFPETWLWDLFPIGNSGKEAVHVTVPDAITEWKAMSFCTSQSRGFGLSPTVGLTAFKPFFVDLTLPYSVVRGESFRLTATIFNYLKDCIRVQTDLAKSHEYQLESWADSQTSSCLCADDAKTHHWNITAVKLGHINFTISTKILDSNEPCGGQKGFVPQKGRSDTLIKPVLVKPEGVLVEKTHSSLLCPKGGKVASESVSLELPVDIVPDSTKAYVTVLGDIMGTALQNLDGLVQMPSGCGEQNMVLFAPIIYVLQYLEKAGLLTEEIRSRAVGFLEIGYQKELMYKHSNGSYSAFGERDGNGNTWLTAFVTKCFGQAQKFIFIDPKNIQDALKWMAGNQLPSGCYANVGNLLHTAMKGGVDDEVSLTAYVTAALLEMGKDVDDPMVSQGLRCLKNSATSTTNLYTQALLAYIFSLAGEMDIRNILLKQLDQQAIISGESIYWSQKPTPSSNASPWSEPAAVDVELTAYALLAQLTKPSLTQKEIAKATSIVAWLAKQHNAYGGFSSTQDTVVALQALAKYATTAYMPSEEINLVVKSTENFQRTFNIQSVNRLVFQQDTLPNVPGMYTLEASGQGCVYVQTVLRYNILPPTNMKTFSLSVEIGKARCEQPTSPRSLTLTIHTSYVGSRSSSNMAIVEVKMLSGFSPMEGTNQLLLQQPLVKKVEFGTDTLNIYLDELIKNTQTYTFTISQSVLVTNLKPATIKVYDYYLPDEQATIQYSDPCE

SEQ ID NO: 81 - protein, 1458 aa, Homo sapiens
  misc_feature (346)..(346): Wherein Xaa may be any naturally occurring amino acid
MWAQLLLGMLALSPAIAEELPNYLVTLPARLNFPSVQKVCLDLSPGYSDVKFTVTLETKDKTQKLLEYSGLKKRHLHCISFLVPPPAGGTEEVATIRVSGVGNNISFEEKKKVLIQRQGNGTFVQTDKPLYTPGQQVYFRIVTMDSNFVPVNDKYSMVELQDPNSNRIAQWLEVVPEQGIVDLSFQLAPEAMLGTYTVAVAEGKTFGTFSVEEYVLSPFLLLLSSVLPKFKVEVVEPKELSTVQESFLVKICCRYTYGKPMLGAVQVSVCQKANTYWYREVEREQLPDKCRNLSGQTDKTGCFSAPVDMATFDLIGYAYSHQINIVATVVEEGTGVEANATQNIYXSPQMGSMTFEDTSNFYHPNFPFSGKMLLKFPQGGVLPCKNHLVFLVIYGTNGTFNQTLVTDNNGLAPFTLETSGWNGTDVSLEGKFQMEDLVYNPEQVPRYYQNAYLHLRPFYSTTRSFLGIHRLNGPLKCGQPQEVLVDYYIDPADASPDQEISFSYYLIGKGSLVMEGQKHLNSKKKGLKASFSLSLTFTSRLAPDPSLVIYAIFPSGGVVADKIQFSVEMCFDNQQLPGAEVELQLQAAPGSLCALRAVDESVLLLRPDRELSNRSVYGMFPFWYGHYPYQVAEYDQCPVSGPWDFPQPLIDPMPQGHSSQRSIIWRPSFSEGTDLFSFFRDVGLKILSNAKIKKPVDCSHRSPEYSTAMGGGGHPEAFESSTPLHQAEDSQVRQYFPETWLWDLFPIGNSGKEAVHVTVPDAITEWKAMSFCTSQSRGFGLSPTVGLTAFKPFFVDLTLPYSVVRGESFRLTATIFNYLKDCIRVQTDLAKSHEYQLESWADSQTSSCLCADDAKTHHWNITAVKLGHINFTISTKILDSNEPCGGQKGFVPQKGRSDTLIKPVLVKPEGVLVEKTHSSLLCPKGGKVASESVSLELPVDIVPDSTKAYVTVLGDIMGTALQNLDGLVQMPSGCGEQNMVLFAPIIYVLQYLEKAGLLTEEIRSRAVGFLEIGYQKELMYKHSNGSYSAFGERDGNGNTWLTAFVTKCFGQAQKFIFIDPKNIQDALKWMAGNQLPSGCYANVGNLLHTAMKGGVDDEVSLTAYVTAALLEMGKDVDDPMVSQGLRCLKNSATSTTNLYTQALLAYIFSLAGEMDIRNILLKQLDQQAIISGESIYWSQKPTPSSNASPWSEPAAVDVELTAYALLAQLTKPSLTQKEIAKATSIVAWLAKQHNAYGGFSSTQDTVVALQALAKYATTAYMPSEEINLVVKSTENFQRTFNIQSVNRLVFQQDTLPNVPGMYTLEASGQGCVYVQTVLRYNILPPTNMKTFSLSVEIGKARCEQPTSPRSLTLTIHTSYVGSRSSSNMAIVEVKMLSGFSPMEGTNQLLLQQPLVKKVEFGTDTLNIYLDELIKNTQTYTFTISQSVLVTNLKPATIKVYDYYLPDEQATIQYSDPCE

SEQ ID NO: 82 - protein, 1458 aa, Homo sapiens; identical to SEQ ID NO: 81
  misc_feature (346)..(346): Wherein Xaa may be any naturally occurring amino acid

SEQ ID NO: 83 - DNA, 324 bp, Homo sapiens
  CDS (1)..(321)
tctggaaagtccttcaaagctggagtctgtcctcctaagaaatctgcccagtgccttagatacaagaaacctgagtgccagagtgactggcagtgtccagggaagaagagatgttgtcctgacacttgtggcatcaaatgcctggatcctgttgacaccccaaacccaacaaggaggaagcctgggaagtacccagtgacttatggccaatgtttgatgcttaacccccccaatttctgtgagatggatggccagtgcaagcgtgacttgaagtgttgcatgggcatgtgtgggaaatcctgcgtttcccctgtgaaagcttag

SEQ ID NO: 84 - protein, 107 aa, Homo sapiens
SGKSFKAGVCPPKKSAQCLRYKKPECQSDWQCPGKKRCCPDTCGIKCLDPVDTPNPTRRKPGKYPVTYGQCLMLNPPNFCEMDGQCKRDLKCCMGMCGKSCVSPVKA

SEQ ID NO: 85 - DNA, 594 bp, Homo sapiens
  CDS (19)..(414)
gtcactcctgccttcaccatgaagtccagcggcctctcccccttcctggtgctgcttgccctgggaactctggcaccttgggctgtggaaggctctggaaagtccttcaaagctggagtctgtcctcctaagaaatctgcccagtgccttagatacaagaaacctgagtgccagagtgactggcagtgtccagggaagaagagatgttgtcctgacacttgtggcatcaaatgcctggatcctgttgacaccccaaacccaacaaggaggaagcctgggaagtgcccagtgacttatggccaatgtttgatgcttaacccccccaatttctgtgagatggatggccagtgcaagcgtgacttgaagtgttgcatgggcatgtgtgggaaatcctgcgtttcccctgtgaaagcttgattcctgccatatggaggaggctctggagtcctgctctgtgtggtccaggtcctttccaccctgagacttggctccaccactgatatcctcctttggggaaaggcttggcacacagcaggctttcaagaagtgccagttgatcaatgaataaataaacgagcctatttctctttgcac

SEQ ID NO: 86 - protein, 132 aa, Homo sapiens
MKSSGLSPFLVLLALGTLAPWAVEGSGKSFKAGVCPPKKSAQCLRYKKPECQSDWQCPGKKRCCPDTCGIKCLDPVDTPNPTRRKPGKCPVTYGQCLMLNPPNFCEMDGQCKRDLKCCMGMCGKSCVSPVKA

SEQ ID NO: 87 - DNA, 594 bp, Homo sapiens
  CDS (19)..(414)
gtcactcctgccttcaccatgaagtccagcggcctcttccccttcctggtgctgcttgccctgggaactctggcaccttgggctgtggaaggctctggaaagtccttcaaagctggagtctgtcctcctaagaaatctgcccagtgccttagatacaagaaacctgagcgccagagtgactggcagtgtccagggaagaagagatgttgtcctgacacttgtggcatcaaatgcctggatcctgttgacaccccaaacccaacaaggaggaagcctgggaagtgcccagtgacttatggccaatgtttgatgcttaacccccccaatttctgtgagatggatggccagtgcaagcgtgacttgaagtgttgcatgggcatgtgtgggaaatcctgcgtttcccctgtgaaagcttgattcctgccatatggaggaggctctggagtcctgctctgtgtggtccaggtcctttccaccctgagacttggctccaccactgatatcctcctttggggaaaggcttggcacacagcaggctttcaagaagtgccagttgatcaatgaataaataaacgagcctatttctctttgcac

SEQ ID NO: 88 - protein, 132 aa, Homo sapiens
MKSSGLFPFLVLLALGTLAPWAVEGSGKSFKAGVCPPKKSAQCLRYKKPERQSDWQCPGKKRCCPDTCGIKCLDPVDTPNPTRRKPGKCPVTYGQCLMLNPPNFCEMDGQCKRDLKCCMGMCGKSCVSPVKA

SEQ ID NO: 89 - DNA, 594 bp, Homo sapiens
  CDS (19)..(414)
gtcactcctgccttcaccatgaagtccagcggcctcttccccttcctggtgccgcttgccctgggaactctggcaccttgggctgtggaaggctctggaaagtccttcaaagctggagtctgtcctcctaagaaatctgcccagtgccttagatacaagaaacctgagtgccagagtgactggcagtgtccagggaagaagagatgttgtcctgacacttgtggcatcaaatgcctggatcctgttgacaccccaaacccaacaaggaggaagcctgggaagtgcccagtgacttatggccaatgtttgatgcttaacccccccaatttctgtgagatggatggccagtgcaagcgtgacttgaagtgttgcatgggcatgtgtgggaaatcctgcgtttcccctgtgaaagcttgattcctgccatatggaggaggctctggagtcctgctctgtgtggtccaggtcctttccaccctgagacttggctccaccactgatatcctcctttggggaaaggcttggcacacagcaggctttcaagaagtgccagttgatcaatgaataaataaacgagcctatttctctttgcac

SEQ ID NO: 90 - protein, 132 aa, Homo sapiens
MKSSGLFPFLVPLALGTLAPWAVEGSGKSFKAGVCPPKKSAQCLRYKKPECQSDWQCPGKKRCCPDTCGIKCLDPVDTPNPTRRKPGKCPVTYGQCLMLNPPNFCEMDGQCKRDLKCCMGMCGKSCVSPVKA

SEQ ID NO: 91 - DNA, 594 bp, Homo sapiens
  CDS (19)..(414)
gtcactcctgccttcaccatgaagtccagcggcctcttccccttcctggtgctgcttgccctgggaactctggcaccttgggctgtggaaggctctggaaagtccttcaaagctggagtctgtcctcctaagaaatctgcccagtgccttagatacaagaaacctgagtgccagagtgactggcagtgtccagggaagaagagatgttgtcctgacacttgtggcatcaaatgcctggatcctgttgacaccccaaacccaacaaggaggaagcctgggaagtgcccagtgacttatggccaatgttcgatgcttaacccccccaatttctgtgagatggatggccagtgcaagcgtgacttgaagtgttgcatgggcatgtgtgggaaatcctgcgtttcccctgtgaaagcttgattcctgccatatggaggaggctctggagtcctgctctgtgtggtccaggtcctttccaccctgagacttggctccaccactgatatcctcctttggggaaaggcttggcacacagcaggctttcaagaagtgccagttgatcaatgaataaataaacgagcctatttctctttgcac

SEQ ID NO: 92 - protein, 132 aa, Homo sapiens
MKSSGLFPFLVLLALGTLAPWAVEGSGKSFKAGVCPPKKSAQCLRYKKPECQSDWQCPGKKRCCPDTCGIKCLDPVDTPNPTRRKPGKCPVTYGQCSMLNPPNFCEMDGQCKRDLKCCMGMCGKSCVSPVKA

SEQ ID NO: 93 - DNA, 594 bp, Homo sapiens
  CDS (19)..(414)
gtcactcctgccttcaccatgaagtccagcggcctcttccccttcctggtgctgcttgccctgggaactctggcaccttgggctgtggaaggctctggaaagtccttcaaagctggagtctgtcctcctaagaaatctgcccagtgccttagatacaagaaacctgagtgccagagtgactggcagtgtccagggaagaagagatgttgtcctgacacttgtggcatcaaatgcctggatcctgttgacaccccaaacccaacaaggaggaagcctgggaagtgcccagtgacttatggccaatgtttgatgcttaacccccccaatttctgtgagatggatggccagtgcaagcgtgacttgaagtgttgcatgggcatgtgtgggaaatcccgcgtttcccctgtgaaagcttgattcctgccatatggaggaggctctggagtcctgctctgtgtggtccaggtcctttccaccctgagacttggctccaccactgatatcctcctttggggaaaggcttggcacacagcaggctttcaagaagtgccagttgatcaatgaataaataaacgagcctatttctctttgcac

SEQ ID NO: 94 - protein, 132 aa, Homo sapiens
MKSSGLFPFLVLLALGTLAPWAVEGSGKSFKAGVCPPKKSAQCLRYKKPECQSDWQCPGKKRCCPDTCGIKCLDPVDTPNPTRRKPGKCPVTYGQCLMLNPPNFCEMDGQCKRDLKCCMGMCGKSRVSPVKA

SEQ ID NO: 95 - DNA, 594 bp, Homo sapiens
  misc_feature (38)..(38): Wherein n may be a, c, g or t
  misc_feature (53)..(53): Wherein n may be a, c, g or t
  misc_feature (169)..(169): Wherein n may be a, c, g or t
  misc_feature (308)..(308): Wherein n may be a, c, g or t
  misc_feature (394)..(394): Wherein n may be a, c, g or t
gtcactcctgccttcaccatgaagtccagcggcctctnccccttcctggtgcngcttgccctgggaactctggcaccttgggctgtggaaggctctggaaagtccttcaaagctggagtctgtcctcctaagaaatctgcccagtgccttagatacaagaaacctgagngccagagtgactggcagtgtccagggaagaagagatgttgtcctgacacttgtggcatcaaatgcctggatcctgttgacaccccaaacccaacaaggaggaagcctgggaagtgcccagtgacttatggccaatgttngatgcttaacccccccaatttctgtgagatggatggccagtgcaagcgtgacttgaagtgttgcatgggcatgtgtgggaaatccngcgtttcccctgtgaaagcttgattcctgccatatggaggaggctctggagtcctgctctgtgtggtccaggtcctttccaccctgagacttggctccaccactgatatcctcctttggggaaaggcttggcacacagcaggctttcaagaagtgccagttgatcaatgaataaataaacgagcctatttctctttgcac

SEQ ID NO: 96 - protein, 132 aa, Homo sapiens
  misc_feature (7)..(7): Wherein Xaa may be any naturally occurring amino acid
  misc_feature (12)..(12): Wherein Xaa may be any naturally occurring amino acid
  misc_feature (51)..(51): Wherein Xaa may be any naturally occurring amino acid
  misc_feature (97)..(97): Wherein Xaa may be any naturally occurring amino acid
  misc_feature (126)..(126): Wherein Xaa may be any naturally occurring amino acid
MKSSGLXPFLVXLALGTLAPWAVEGSGKSFKAGVCPPKKSAQCLRYKKPEXQSDWQCPGKKRCCPDTCGIKCLDPVDTPNPTRRKPGKCPVTYGQCXMLNPPNFCEMDGQCKRDLKCCMGMCGKSXVSPVKA

SEQ ID NO: 97 - DNA, 3445 bp, Homo sapiens
  CDS (117)..(2381)
caccgcgtgttcgcgcctggtagagatttctcgaagacaccagtgggcccgtgtggaaccaaacctgcgcgcgtggccgggccgtgggacaacgaggccgcggagacgaaggcgcaatggcgaggaagttatctgtaatcttgatcctgacctttgccctctctgtcacaaatccccttcatgaactaaaagcagctgctttcccccagaccactgagaaaattagtccgaattgggaatctggcattaatgttgacttggcaatttccacacggcaatatcatctacaacagcttttctaccgctatggagaaaataattctttgtcagttgaagggttcagaaaattacttcaaaatataggcatagataagattaaaagaatccatatacaccatgaccacgaccatcactcagaccacgagcatcactcagaccatgagcgtcactcagaccatgagcatcactcagagcacgagcatcactctgaccatgatcatcactctcaccataatcatgctgcttctggtaaaaataagcgaaaagctctttgcccagaccatgactcagatagttcaggtaaagatcctagaaacagccaggggaaaggagctcaccgaccagaacatgccagtggtagaaggaatgtcaaggacagtgttagtgctagtgaagtgacctcaactgtgtacaacactgtctctgaaggaactcactttctagagacaatagagactccaagacctggaaaactcttccccaaagatgtaagcagctccactccacccagtgtcacatcaaagagccgggtgagccggctggctggtaggaaaacaaatgaatctgtgagtgagccccgaaaaggctttatgtattccagaaacacaaatgaaaatcctcaggagtgtttcaatgcatcaaagctactgacatctcatggcatgggcatccaggttccgctgaatgcaacagagttcaactatctctgtccagccatcatcaaccaaattgatgctagatcttgtctgattcatacaagtgaaaagaaggctgaaatccctccaaagacctattcattacaaatagcctgggttggtggttttatagccatttccatcatcagtttcctgtctctgctgggggttatcttagtgcctctcatgaatcgggtgtttttcaaatttctcctgagtttccttgtggcactggccgttgggactttgagtggtgatgcttttttacaccttcttccacattctcatgcaagtcaccaccatagtcatagccatgaagaaccagcaatggaaatgaaaagaggaccacttttcagtcatctgtcttctcaaaacatagaagaaagtgcctattttgattccacgtggaagggtctaacagctctaggaggcctgtatttcatgtttcttgttgaacatgtcctcacattgatcaaacaatttaaagataagaagaaaaagaatcagaagaaacctgaaaatgatgatgatgtggagattaagaagcagttgtccaagtatgaatctcaactttcaacaaatgaggagaaagtagatacagatgatcgaactgaaggctatttacgagcagactcacaagagccctcccactttgattctcagcagcctgcagtcttggaagaagaagaggtcatgatagctcatgctcatccacaggaagtctacaatgaatatgtacccagagggtgcaagaataaatgccattcacatttccacgatacactcggccagtcagacgatctcattcaccaccatcatgactaccatcatattctccatcatcaccaccaccaaaaccaccatcctcacagtcacagccagcgctactctcgggaggagctgaaagatgccggcgtcgccactctggcctggatggtgataatgggtgatggcctgcacaatttcagcgatggcctagcaattggtgctgcttttactgaaggcttatcaagtggtttaagtacttctgttgctgtgttctgtcatgagttgcctcatgaattaggtgactttgctgttctactaaaggctggcatgaccgttaagcaggctgtcctttataatgcattgtcagccatgctggcgtatcttggaatggcaacaggaattttcattggtcattatgctgaaaatgtttctatgtggatatttgcacttactgctggcttattcatgtatgttgctctggttgatatggtacctgaaatgctgcacaatgatgctagtgaccatggatgtagccgctgggggtatttctttttacagaatgctgggatgcttttgggttttggaattatgttacttatttccatatttgaacataaaatcgtgtttcgtataaatttctagttaaggtttaaatgctagagtagcttaaaaagttgtcatagtttcagtaggtcatagggagatgagtttgtatgctgtactatgcagcgtttaaagttagtgggttttgtgatttttgtattgaatattgctgtctgttacaaagtcagttaaaggtacgttttaatatttaagttattctatcttggagataaaatctgtatgtgcaattcaccggtattaccagtttattatgtaaacaagagatttggcatgacatgttctgtatgtttcagggaaaaatgtctttaatgctttttcaagaactaacacagttattcctatactggattttaggtctctgaagaactgctggtgtttaggaataagaatgtgcatgaagcctaaaataccaagaaagcttatactgaatttaagcaaagaaataaaggagaaaagagaagaatctgagaattggggaggcatagattcttataaaaatcacaaaatttgttgtaaattagaggggagaaatttagaattaagtataaaaaggcagaattagtatagagtacattcattaaacatttttgtcaggattatttcccgtaaaaacgtagtgagcacttttcatatactaatttagttgtacatttaactttgtataatacagaaatctaaatatatttaatgaattcaagcaatatatcacttgaccaagaaattggaatttcaaaatgttcgtgcgggtatataccagatgagtacagtgagtagttttatgtatcaccagactgggttattgccaagttatatatcaccaaaagctgtatgactggatgttctggttacctggtttacaaaattatcagagtagtaaaactttgatatatatgaggatattaaaactacactaagtatcatttgattcgattcagaaagtactttgatatctctcagtgcttcagtgctatcattgtgagcaattgtcttttatatacggtactgtagccatactaggcctgtctgtggcattctctagatgtttcttttttacacaataaattccttatatcagcttg

SEQ ID NO: 98 - protein, 755 aa, Homo sapiens
MARKLSVILILTFALSVTNPLHELKAAAFPQTTEKISPNWESGINVDLAISTRQYHLQQLFYRYGENNSLSVEGFRKLLQNIGIDKIKRIHIHHDHDHHSDHEHHSDHERHSDHEHHSEHEHHSDHDHHSHHNHAASGKNKRKALCPDHDSDSSGKDPRNSQGKGAHRPEHASGRRNVKDSVSASEVTSTVYNTVSEGTHFLETIETPRPGKLFPKDVSSSTPPSVTSKSRVSRLAGRKTNESVSEPRKGFMYSRNTNENPQECFNASKLLTSHGMGIQVPLNATEFNYLCPAIINQIDARSCLIHTSEKKAEIPPKTYSLQIAWVGGFIAISIISFLSLLGVILVPLMNRVFFKFLLSFLVALAVGTLSGDAFLHLLPHSHASHHHSHSHEEPAMEMKRGPLFSHLSSQNIEESAYFDSTWKGLTALGGLYFMFLVEHVLTLIKQFKDKKKKNQKKPENDDDVEIKKQLSKYESQLSTNEEKVDTDDRTEGYLRADSQEPSHFDSQQPAVLEEEEVMIAHAHPQEVYNEYVPRGCKNKCHSHFHDTLGQSDDLIHHHHDYHHILHHHHHQNHHPHSHSQRYSREELKDAGVATLAWMVIMGDGLHNFSDGLAIGAAFTEGLSSGLSTSVAVFCHELPHELGDFAVLLKAGMTVKQAVLYNALSAMLAYLGMATGIFIGHYAENVSMWIFALTAGLFMYVALVDMVPEMLHNDASDHGCSRWGYFFLQNAGMLLGFGIMLLISIFEHKIVFRINF

SEQ ID NO: 99 - DNA, 912 bp, Homo sapiens
  CDS (1)..(912)
aatcccctttatgaactaaaagcagctgctttccctcagaccactgagaaaattagtccgaattgggaatctggcattaatgttgacttggcaatttccacacggcaatatcatctacaacagcttttctaccgctatggagaaaataattctttgtcagttgaagggttcagaaaattacttcaaaatataggcatagataagattaaaagaatccatatacaccatgaccacgaccatcactcagaccacgagcatcactcagaccatgagcgtcactcagaccatgagcatcactcagaccacgagcatcactctgaccatgatcatcactcccaccataatcatgctgcttctggtaaaaataagcgaaaagctctttgcccagaccatgactcagatagttcaggtaaagatcctagaaacagccaggggaaaggagctcaccgaccagaacatgccagtggtagaaggaatgtcaaggacagtgttagtgctagtgaagtgacctcaactgtgtacaacactgtctctgaaggaactcactttctagagacaatagagactccaagacctggaaaactcttccccaaagatgtaagcagctccactccacccagtgtcacatcaaagagccgggtgagccggctggctggtaggaaaacaaatgaatctgtgagtgagccccgaaaaggctttatgtattccagaaacacaaatgaaaatcctcaggagtgtttcaatgcatcaaagctactgacatctcatggcatgggcatccaggttccgctgaatgcaacagagttcaactatctctgtccagccatcatcaaccaaattgatgctagatcttgtctgattcatacaagtgaaaagaaggctgaaatccctccaaagacctattcattacaa

SEQ ID NO: 100 - protein, 304 aa, Homo sapiens
NPLYELKAAAFPQTTEKISPNWESGINVDLAISTRQYHLQQLFYRYGENNSLSVEGFRKLLQNIGIDKIKRIHIHHDHDHHSDHEHHSDHERHSDHEHHSDHEHHSDHDHHSHHNHAASGKNKRKALCPDHDSDSSGKDPRNSQGKGAHRPEHASGRRNVKDSVSASEVTSTVYNTVSEGTHFLETIETPRPGKLFPKDVSSSTPPSVTSKSRVSRLAGRKTNESVSEPRKGFMYSRNTNENPQECFNASKLLTSHGMGIQVPLNATEFNYLCPAIINQIDARSCLIHTSEKKAEIPPKTYSLQ

SEQ ID NO: 101 - DNA, 1186 bp, Homo sapiens
  CDS (3)..(1148)
ctatgggcgcggctgccgggtggctgcgcggcgctgcccccggaccgaggggcagccaatccaatgaaaccaccgcgtgttcgcgcctggtagagatttctcgaagacaccagtgggcccgttccgagccctctggaccgcccgtgtggaaccaaacctgcgcgcgtggccgggccgtgggacaacgaggccgcggagacgaaggcgcaatggcgaggaagttatctgtaatcttgatcctgacctttgccctctctgtcacaaatccccttcatgaactaaaagcagctgctttcccccagaccactgagaaaattagtccgaattgggaatctggcattaatgttgacttggcaatttccacacggcaatatcatctacaacagcttttctaccgctatggagaaaataattctttgtcagttgaagggttcagaaaattacttcaaaatataggcatagataagattaaaagaatccatatacaccatgaccacgaccatcactcagaccacgagcatcactcagaccatgagcgtcactcagaccatgagcatcactcagaccacgagcatcactctgaccatgatcatcactctcaccataatcatgctgcttttactgaaggcttatcaagtggtttaagtacttctgttgctgtgttctgtcatgagttgcctcatgaattaggtgactttgctgttctactaaaggctggcatgaccgttaagcaggctgtcctttataatgcattgtcagccatgctggcgtatcttggaatggcaacaggaattttcattggtcattatgctgaaaatgtttctatgtggatatttgcacttactgctggcttattcatgtatgttgctctggttgatatggtacctgaaatgctgcacaatgatgctagtgaccatggatgtagccactgggggtatttctttttacagaatgctgggatgcttttgggttttggaattatgttacttatttccatatttgaacataaaatcgtgtttcgtataaatttcaattctccatcatcaccaccaccaaaaccaccatcctcacagtcacagccagcgctactctcgggaggagctgaaagatgccggcgtcgccactctggcctggatggtgataatgggtgatggcctgcacaatttcagcgatggcctagcaattg

SEQ ID NO: 102 - protein, 382 aa, Homo sapiens
MGAAAGWLRGAAPGPRGSQSNETTACSRLVEISRRHQWARSEPSGPPVWNQTCARGRAVGQRGRGDEGAMARKLSVILILTFALSVTNPLHELKAAAFPQTTEKISPNWESGINVDLAISTRQYHLQQLFYRYGENNSLSVEGFRKLLQNIGIDKIKRIHIHHDHDHHSDHEHHSDHERHSDHEHHSDHEHHSDHDHHSHHNHAAFTEGLSSGLSTSVAVFCHELPHELGDFAVLLKAGMTVKQAVLYNALSAMLAYLGMATGIFIGHYAENVSMWIFALTAGLFMYVALVDMVPEMLHNDASDHGCSHWGYFFLQNAGMLLGFGIMLLISIFEHKIVFRINFNSPSSPPPKPPSSQSQPALLSGGAERCRRRHSGLDGDNG

SEQ ID NO: 103 - DNA, 1101 bp, Homo sapiens
  CDS (123)..(1028)
tggtagagatttctcgaagacaccagtgggcccgttccgagccctctggaccgcccgtgtggaaccaaacctgcgcgcgtggccgggccgtgggacaacgaggccgcggagacgaaggcgcaatggcgaggaagttatctgtaatcttgatcctgacctttgccctctctgtcacaaatccccttcatgaactaaaagcagctgctttcccccagaccactgagaaaattagtccgaattgggaatctggcattaatgttgacttggcaatttccacacggcaatatcatctacaacagcttttctaccgctatggagaaaataattctttgtcagttgaagggttcagaaaattacttcaaaatataggcatagataagattaaaagaatccatatacaccatgaccacgaccatcactcagaccacgagcatcactcagaccatgagcgtcactcagaccatgagcatcactcagaccaccatcctcacagtcacagccagcgctactctcgggaggagctgaaagatgccggcgtcgccactttggcctggatggtgataatgggtgatggcctgcacaatttcagcgatggtctagcaattggtgctgcttttactgaaggcttatcaagtggtttaagtacttctgttgctgtgttctgtcatgagttgcctcatgaattaggtgactttgctgttctactaaaggctggcatgaccgttaagcaggctgtcctttataatgcattgtcagccatgctggcgtatcttggaatggcaacaggaattttcattggtcattatgctgaaaatgtttctatgtggatatttgcacttactgctggcttattcatgcatgttgctctggttgatatggtacctgaaatgctgcacaatgatgctagtgaccatggatgtagccgctgggggtatttctttttacagaatgctgggatgcttttgggttttggaattatgttacttatttccatatttgaacataaaatcgtgtttcgtataaatttctagttaaggtttaaatgctagagtagcttaaaaagttgtcatagtttcagtaggtcatagggagatgagtttg

SEQ ID NO: 104 - protein, 302 aa, Homo sapiens
MARKLSVILILTFALSVTNPLHELKAAAFPQTTEKISPNWESGINVDLAISTRQYHLQQLFYRYGENNSLSVEGFRKLLQNIGIDKIKRIHIHHDHDHHSDHEHHSDHERHSDHEHHSDHHPHSHSQRYSREELKDAGVATLAWMVIMGDGLHNFSDGLAIGAAFTEGLSSGLSTSVAVFCHELPHELGDFAVLLKAGMTVKQAVLYNALSAMLAYLGMATGIFIGHYAENVSMWIFALTAGLFMHVALVDMVPEMLHNDASDHGCSRWGYFFLQNAGMLLGFGIMLLISIFEHKIVFRINF

SEQ ID NO: 105 - DNA, 2268 bp, Homo sapiens
  CDS (1)..(2265)
atggcgaggaagttatctgtaatcttgatcctgacctttgccctctctgtcacaaacccccttcatgaactaaaagcagctgctttcccccagaccactgagaaaattagtccgaattgggaatctggcattaatgttgacttggcaatttccacacggcaatatcatctacaacagcttttctaccgctatggagaaaataattctttgtcagttgaggggttcagaaaattacttcaaaatataggcatagataagattaaaagaatccatatacaccacgaccacgaccatcactcagaccacgagcatcactcagaccatgagcgtcactcagaccatgagcatcactcagaccacgagcatcactctgaccatgatcatcactctcaccataatcatgctgcttctggtaaaaataagcgaaaagctctttgcccagaccatgactcagatagttcaggtaaagatcctagaaacagccaggggaaaggagctcaccgaccagaacatgccagtggtagaaggaatgtcaaggacagtgttagtgctagtgaagtgacctcaactgtgtacaacactgtctctgaaggaactcactttctagagacaatagagactccaagacctggaaaactcttccccaaagatgtaagcagctccactccacccagtgtcacatcaaagagccgggtgagccggctggctggtaggaaaacaaatgaatctgtgagtgagccccgaaaaggctttatgtattccagaaacacaaatgaaaatcctcaggagtgtttcaatgcatcaaagctactgacatctcatggcatgggcatccaggttccgctgaatgcaacagagttcaactatctctgtccagccatcatcaaccaaattgatgctagatcttgtctgattcatacaagtgaaaagaaggctgaaatccctccaaagacctattcattacaaatagcctgggttggtggttttatagccatttccatcatcagtttcctgtctctgctgggggttatcttagtgcctctcatgaatcgggtgtttttcaaatttctcctgagtttccttgtggcactggccgttgggactttgagtggtgatgcttttttacaccttcttccacattctcatgcaagtcaccaccatagtcatagccatgaagaaccagcaatggaaatgaaaagaggaccactttttagtcatctgtcttctcaaaacatagaagaaagtgcctattttgattccacgtggaagggtctaacagctctaggaggcctgtatttcatgtttcttgttgaacatgtcctcacattgatcaaacaatttaaagataagaagaaaaagaatcagaagaaacctgaaaatgatgatgatgtggagattaagaagcagttgtccaagtatgaatctcaactttcaacaaatgaggagaaagtagatacagatgatcgaactgaaggctatttacgagcagactcacaagagccctcccactttgattctcagcagcctgcagtcttggaagaagaagaggtcatgatagctcatgctcatccacaggaagtctacaatgaatatgtacccagagggtgcaagaataaatgccattcacatttccacgatacactcggccagtcagacgatctcattcaccaccatcatgactaccatcatattctccatcatcaccaccaccaaaaccaccatcctcacagtcacagccagcgctactctcgggaggagctgaaagatgccggcgtcgccactctggcctggatggtgataatgggtgatggcctgcacaatttcagcgatggcctagcaattggtgctgcttttactgaaggcttatcaagtggtttaagtacttctgttgctgtgttctgtcatgagttgcctcatgaattaggtgactttgctgttctactaaaggctggcatgaccgttaagcaggctgtcctttataatgcattgtcagccatgctggcgtatcttggaatggcaacaggaattttcattggtcattatgctgaaaatgtttctatgtggatatttgcacttactgctggcttattcatgtatgttgctctggttgatatggtacctgaaatgctgcacaatgatgctagtgaccatggatgtagccgctgggggtatttctttttacagaatgctgggatgcttttgggttttggaattatgttacttatttccatatttgaacataaaatcgtgtttcgtataaatttctag

SEQ ID NO: 106 - protein, 755 aa, Homo sapiens
MARKLSVILILTFALSVTNPLHELKAAAFPQTTEKISPNWESGINVDLAISTRQYHLQQLFYRYGENNSLSVEGFRKLLQNIGIDKIKRIHIHHDHDHHSDHEHHSDHERHSDHEHHSDHEHHSDHDHHSHHNHAASGKNKRKALCPDHDSDSSGKDPRNSQGKGAHRPEHASGRRNVKDSVSASEVTSTVYNTVSEGTHFLETIETPRPGKLFPKDVSSSTPPSVTSKSRVSRLAGRKTNESVSEPRKGFMYSRNTNENPQECFNASKLLTSHGMGIQVPLNATEFNYLCPAIINQIDARSCLIHTSEKKAEIPPKTYSLQIAWVGGFIAISIISFLSLLGVILVPLMNRVFFKFLLSFLVALAVGTLSGDAFLHLLPHSHASHHHSHSHEEPAMEMKRGPLFSHLSSQNIEESAYFDSTWKGLTALGGLYFMFLVEHVLTLIKQFKDKKKKNQKKPENDDDVEIKKQLSKYESQLSTNEEKVDTDDRTEGYLRADSQEPSHFDSQQPAVLEEEEVMIAHAHPQEVYNEYVPRGCKNKCHSHFHDTLGQSDDLIHHHHDYHHILHHHHHQNHHPHSHSQRYSREELKDAGVATLAWMVIMGDGLHNFSDGLAIGAAFTEGLSSGLSTSVAVFCHELPHELGDFAVLLKAGMTVKQAVLYNALSAMLAYLGMATGIFIGHYAENVSMWIFALTAGLFMYVALVDMVPEMLHNDASDHGCSRWGYFFLQNAGMLLGFGIMLLISIFEHKIVFRINF

SEQ ID NO: 107 - DNA, 2310 bp, Homo sapiens
  CDS (1)..(2307)
atgggtaagcctatccctaaccctctcctcggtctcgattctacggcgaggaagttatctgtaatcttgatcctgacctttgccctctctgtcacaaacccccttcatgaactaaaagcagctgctttcccccagaccactgagaaaattagtccgaattgggaatctggcattaatgttgacttggcaatttccacacggcaatatcatctacaacagcttttctaccgctatggagaaaataattctttgtcagttgaggggttcagaaaattacttcaaaatataggcatagataagattaaaagaatccatatacaccacgaccacgaccatcactcagaccacgagcatcactcagaccatgagcgtcactcagaccatgagcatcactcagaccacgagcatcactctgaccatgatcatcactctcaccataatcatgctgcttctggtaaaaataagcgaaaagctctttgcccagaccatgactcagatagttcaggtaaagatcctagaaacagccaggggaaaggagctcaccgaccagaacatgccagtggtagaaggaatgtcaaggacagtgttagtgctagtgaagtgacctcaactgtgtacaacactgtctctgaaggaactcactttctagagacaatagagactccaagacctggaaaactcttccccaaagatgtaagcagctccactccacccagtgtcacatcaaagagccgggtgagccggctggctggtaggaaaacaaatgaatctgtgagtgagccccgaaaaggctttatgtattccagaaacacaaatgaaaatcctcaggagtgtttcaatgcatcaaagctactgacatctcatggcatgggcatccaggttccgctgaatgcaacagagttcaactatctctgtccagccatcatcaaccaaattgatgctagatcttgtctgattcatacaagtgaaaagaaggctgaaatccctccaaagacctattcattacaaatagcctgggttggtggttttatagccatttccatcatcagtttcctgtctctgctgggggttatcttagtgcctctcatgaatcgggtgtttttcaaatttctcctgagtttccttgtggcactggccgttgggactttgagtggtgatgcttttttacaccttcttccacattctcatgcaagtcaccaccatagtcatagccatgaagaaccagcaatggaaatgaaaagaggaccactttttagtcatctgtcttctcaaaacatagaagaaagtgcctattttgattccacgtggaagggtctaacagctctaggaggcctgtatttcatgtttcttgttgaacatgtcctcacattgatcaaacaatttaaagataagaagaaaaagaatcagaagaaacctgaaaatgatgatgatgtggagattaagaagcagttgtccaagtatgaatctcaactttcaacaaatgaggagaaagtagatacagatgatcgaactgaaggctatttacgagcagactcacaagagccctcccactttgattctcagcagcctgcagtcttggaagaagaagaggtcatgatagctcatgctcatccacaggaagtctacaatgaatatgtacccagagggtgcaagaataaatgccattcacatttccacgatacactcggccagtcagacgatctcattcaccaccatcatgactaccatcatattctccatcatcaccaccaccaaaaccaccatcctcacagtcacagccagcgctactctcgggaggagctgaaagatgccggcgtcgccactctggcctggatggtgataatgggtgatggcctgcacaatttcagcgatggcctagcaattggtgctgcttttactgaaggcttatcaagtggtttaagtacttctgttgctgtgttctgtcatgagttgcctcatgaattaggtgactttgctgttctactaaaggctggcatgaccgttaagcaggctgtcctttataatgcattgtcagccatgctggcgtatcttggaatggcaacaggaattttcattggtcattatgctgaaaatgtttctatgtggatatttgcacttactgctggcttattcatgtatgttgctctggttgatatggtacctgaaatgctgcacaatgatgctagtgaccatggatgtagccgctgggggtatttctttttacagaatgctgggatgcttttgggttttggaattatgttacttatttccatatttgaacataaaatcgtgtttcgtataaatttctag

SEQ ID NO: 108 - protein, 769 aa, Homo sapiens
MGKPIPNPLLGLDSTARKLSVILILTFALSVTNPLHELKAAAFPQTTEKISPNWESGINVDLAISTRQYHLQQLFYRYGENNSLSVEGFRKLLQNIGIDKIKRIHIHHDHDHHSDHEHHSDHERHSDHEHHSDHEHHSDHDHHSHHNHAASGKNKRKALCPDHDSDSSGKDPRNSQGKGAHRPEHASGRRNVKDSVSASEVTSTVYNTVSEGTHFLETIETPRPGKLFPKDVSSSTPPSVTSKSRVSRLAGRKTNESVSEPRKGFMYSRNTNENPQECFNASKLLTSHGMGIQVPLNATEFNYLCPAIINQIDARSCLIHTSEKKAEIPPKTYSLQIAWVGGFIAISIISFLSLLGVILVPLMNRVFFKFLLSFLVALAVGTLSGDAFLHLLPHSHASHHHSHSHEEPAMEMKRGPLFSHLSSQNIEESAYFDSTWKGLTALGGLYFMFLVEHVLTLIKQFKDKKKKNQKKPENDDDVEIKKQLSKYESQLSTNEEKVDTDDRTEGYLRADSQEPSHFDSQQPAVLEEEEVMIAHAHPQEVYNEYVPRGCKNKCHSHFHDTLGQSDDLIHHHHDYHHILHHHHHQNHHPHSHSQRYSREELKDAGVATLAWMVIMGDGLHNFSDGLAIGAAFTEGLSSGLSTSVAVFCHELPHELGDFAVLLKAGMTVKQAVLYNALSAMLAYLGMATGIFIGHYAENVSMWIFALTAGLFMYVALVDMVPEMLHNDASDHGCSRWGYFFLQNAGMLLGFGIMLLISIFEHKIVFRINF

SEQ ID NO: 109 - DNA, 2211 bp, Homo sapiens
  CDS (1)..(2211)
aatccccttcatgaactaaaagcagctgctttcccccagaccactgagaaaattagtccgaattgggaatctggcattaatgttgacttggcaatttccacacggcaatatcatctacaacagcttttctaccgctatggagaaaataattctttgtcagttgaggggttcagaaaattacttcaaaatataggcatagataagattaaaagaatccatatacaccacgaccacgaccatcactcagaccacgagcatcactcagaccatgagcgtcactcagaccatgagcatcactcagaccacgagcatcactctgaccatgatcatcactctcaccataatcatgctgcttctggtaaaaataagcgaaaagctctttgcccagaccatgactcagatagttcaggtaaagatcctagaaacagccaggggaaaggagctcaccgaccagaacatgccagtggtagaaggaatgtcaaggacagtgttagtgctagtgaagtgacctcaactgtgtacaacactgtctctgaaggaactcactttctagagacaatagagactccaagacctggaaaactcttccccaaagatgtaagcagctccactccacccagtgtcacatcaaagagccgggtgagccggctggctggtaggaaaacaaatgaatctgtgagtgagccccgaaaaggctttatgtattccagaaacacaaatgaaaatcctcaggagtgtttcaatgcatcaaagctactgacatctcatggcatgggcatccaggttccgctgaatgcaacagagttcaactatctctgtccagccatcatcaaccaaattgatgctagatcttgtctgattcatacaagtgaaaagaaggctgaaatccctccaaagacctattcattacaaatagcctgggttggtggttttatagccatttccatcatcagtttcctgtctctgctgggggttatcttagtgcctctcatgaatcgggtgtttttcaaatttctcctgagtttccttgtggcactggccgttgggactttgagtggtgatgcttttttacaccttcttccacattctcatgcaagtcaccaccatagtcatagccatgaagaaccagcaatggaaatgaaaagaggaccactttttagtcatctgtcttctcaaaacatagaagaaagtgcctattttgattccacgtggaagggtctaacagctctaggaggcctgtatttcatgtttcttgttgaacatgtcctcacattgatcaaacaatttaaagataagaagaaaaagaatcagaagaaacctgaaaatgatgatgatgtggagattaagaagcagttgtccaagtatgaatctcaactttcaacaaatgaggagaaagtagatacagatgatcgaactgaaggctatttacgagcagactcacaagagccctcccactttgattctcagcagcctgcagtcttggaagaagaagaggtcatgatagctcatgctcatccacaggaagtctacaatgaatatgtacccagagggtgcaagaataaatgccattcacatttccacgatacactcggccagtcagacgatctcattcaccaccatcatgactaccatcatattctccatcatcaccaccaccaaaaccaccatcctcacagtcacagccagcgctactctcgggaggagctgaaagatgccggcgtcgccactctggcctggatggtgataatgggtgatggccagcacaatttcagcgatggcctagcaattggtgatgcttttactgaaggcttatcaagtggtttaagtacttctgttgctgtgttctgtcatgagttgcctcatgaattaggtgactttgctgttctactaaaggctggcatgaccgttaagcaggctgtcctttataatgcattgtcagccatgctggcgtatcttggaatggcaacaggaattttcattggtcattatgctgaaaatgtttctatgtggatatttgcacttactgctggcttattcatgtatgttgctctggttgatatggtacctgaaatgctgcacaatgatgctagtgaccatggatgtagccgctgggggtatttctttttacagaatgctgggatgcttttgggttttggaattatgttacttatttccatatttgaacataaaatcgtgtttcgtataaatttc

SEQ ID NO: 110 - protein, 737 aa, Homo sapiens
NPLHELKAAAFPQTTEKISPNWESGINVDLAISTRQYHLQQLFYRYGENNSLSVEGFRKLLQNIGIDKIKRIHIHHDHDHHSDHEHHSDHERHSDHEHHSDHEHHSDHDHHSHHNHAASGKNKRKALCPDHDSDSSGKDPRNSQGKGAHRPEHASGRRNVKDSVSASEVTSTVYNTVSEGTHFLETIETPRPGKLFPKDVSSSTPPSVTSKSRVSRLAGRKTNESVSEPRKGFMYSRNTNENPQECFNASKLLTSHGMGIQVPLNATEFNYLCPAIINQIDARSCLIHTSEKKAEIPPKTYSLQIAWVGGFIAISIISFLSLLGVILVPLMNRVFFKFLLSFLVALAVGTLSGDAFLHLLPHSHASHHHSHSHEEPAMEMKRGPLFSHLSSQNIEESAYFDSTWKGLTALGGLYFMFLVEHVLTLIKQFKDKKKKNQKKPENDDDVEIKKQLSKYESQLSTNEEKVDTDDRTEGYLRADSQEPSHFDSQQPAVLEEEEVMIAHAHPQEVYNEYVPRGCKNKCHSHFHDTLGQSDDLIHHHHDYHHILHHHHHQNHHPHSHSQRYSREELKDAGVATLAWMVIMGDGQHNFSDGLAIGDAFTEGLSSGLSTSVAVFCHELPHELGDFAVLLKAGMTVKQAVLYNALSAMLAYLGMATGIFIGHYAENVSMWIFALTAGLFMYVALVDMVPEMLHNDASDHGCSRWGYFFLQNAGMLLGFGIMLLISIFEHKIVFRINF

SEQ ID NO: 111 - DNA, 3445 bp, Homo sapiens
  CDS (117)..(2381)
caccgcgtgttcgcgcctggtagagatttctcgaagacaccagtgggcccgtgtggaaccaaacctgcgcgcgtggccgggccgtgggacaacgaggccgcggagacgaaggcgcaatggcgaggaagttatctgtaatcttgatcctgacctttgccccctctgtcacaaatccccttcatgaactaaaagcagctgctttcccccagaccactgagaaaattagtccgaattgggaatctggcattaatgttgacttggcaatttccacacggcaatatcatctacaacagcttttctaccgctatggagaaaataattctttgtcagttgaagggttcagaaaattacttcaaaatataggcatagataagattaaaagaatccatatacaccatgaccacgaccatcactcagaccacgagcatcactcagaccatgagcgtcactcagaccatgagcatcactcagagcacgagcatcactctgaccatgatcatcactctcaccataatcatgctgcttctggtaaaaataagcgaaaagctctttgcccagaccatgactcagatagttcaggtaaagatcctagaaacagccaggggaaaggagctcaccgaccagaacatgccagtggtagaaggaatgtcaaggacagtgttagtgctagtgaagtgacctcaactgtgtacaacactgtctctgaaggaactcactttctagagacaatagagactccaagacctggaaaactcttccccaaagatgtaagcagctccactccacccagtgtcacatcaaagagccgggtgagccggctggctggtaggaaaacaaatgaatctgtgagtgagccccgaaaaggctttatgtattccagaaacacaaatgaaaatcctcaggagtgtttcaatgcatcaaagctactgacatctcatggcatgggcatccaggttccgctgaatgcaacagagttcaactatctctgtccagccatcatcaaccaaattgatgctagatcttgtctgattcatacaagtgaaaagaaggctgaaatccctccaaagacctattcattacaaatagcctgggttggtggttttatagccatttccatcatcagtttcctgtctctgctgggggttatcttagtgcctctcatgaatcgggtgtttttcaaatttctcctgagtttccttgtggcactggccgttgggactttgagtggtgatgcttttttacaccttcttccacattctcatgcaagtcaccaccatagtcatagccatgaagaaccagcaatggaaatgaaaagaggaccacttttcagtcatctgtcttctcaaaacatagaagaaagtgcctattttgattccacgtggaagggtctaacagctctaggaggcctgtatttcatgtttcttgttgaacatgtcctcacattgatcaaacaatttaaagataagaagaaaaagaatcagaagaaacctgaaaatgatgatgatgtggagattaagaagcagttgtccaagtatgaatctcaactttcaacaaatgaggagaaagtagatacagatgatcgaactgaaggctatttacgagcagactcacaagagccctcccactttgattctcagcagcctgcagtcttggaagaagaagaggtcatgatagctcatgctcatccacaggaagtctacaatgaatatgtacccagagggtgcaagaataaatgccattcacatttccacgatacactcggccagtcagacgatctcattcaccaccatcatgactaccatcatattctccatcatcaccaccaccaaaaccaccatcctcacagtcacagccagcgctactctcgggaggagctgaaagatgccggcgtcgccactctggcctggatggtgataatgggtgatggcctgcacaatttcagcgatggcctagcaattggtgctgcttttactgaaggcttatcaagtggtttaagtacttctgttgctgtgttctgtcatgagttgcctcatgaattaggtgactttgctgttctactaaaggctggcatgaccgttaagcaggctgtcctttataatgcattgtcagccatgctggcgtatcttggaatggcaacaggaattttcattggtcattatgctgaaaatgtttctatgtggatatttgcacttactgctggcttattcatgtatgttgctctggttgatatggtacctgaaatgctgcacaatgatgctagtgaccatggatgtagccgctgggggtatttctttttacagaatgctgggatgcttttgggttttggaattatgttacttatttccatatttgaacataaaatcgtgtttcgtataaatttctagttaaggtttaaatgctagagtagcttaaaaagttgtcatagtttcagtaggtcatagggagatgagtttgtatgctgtactatgcagcgtttaaagttagtgggttttgtgatttttgtattgaatattgctgtctgttacaaagtcagttaaaggtacgttttaatatttaagttattctatcttggagataaaatctgtatgtgcaattcaccggtattaccagtttattatgtaaacaagagatttggcatgacatgttctgtatgtttcagggaaaaatgtctttaatgctttttcaagaactaacacagttattcctatactggattttaggtctctgaagaactgctggtgtttaggaataagaatgtgcatgaagcctaaaataccaagaaagcttatactgaatttaagcaaagaaataaaggagaaaagagaagaatctgagaattggggaggcatagattcttataaaaatcacaaaatttgttgtaaattagaggggagaaatttagaattaagtataaaaaggcagaattagtatagagtacattcattaaacatttttgtcaggattatttcccgtaaaaacgtagtgagcacttttcatatactaatttagttgtacatttaactttgtataatacagaaatctaaatatatttaatgaattcaagcaatatatcacttgaccaagaaattggaatttcaaaatgttcgtgcgggtatataccagatgagtacagtgagtagttttatgtatcaccagactgggttattgccaagttatatatcaccaaaagctgtatgactggatgttctggttacctggtttacaaaattatcagagtagtaaaactttgatatatatgaggatattaaaactacactaagtatcatttgattcgattcagaaagtactttgatatctctcagtgcttcagtgctatcattgtgagcaattgtcttttatatacggtactgtagccatactaggcctgtctgtggcattctctagatgtttcttttttacacaataaattccttatatcagcttg

SEQ ID NO: 112 - protein, 755 aa, Homo sapiens
MARKLSVILILTFAPSVTNPLHELKAAAFPQTTEKISPNWESGINVDLAISTRQYHLQQLFYRYGENNSLSVEGFRKLLQNIGIDKIKRIHIHHDHDHHSDHEHHSDHERHSDHEHHSEHEHHSDHDHHSHHNHAASGKNKRKALCPDHDSDSSGKDPRNSQGKGAHRPEHASGRRNVKDSVSASEVTSTVYNTVSEGTHFLETIETPRPGKLFPKDVSSSTPPSVTSKSRVSRLAGRKTNESVSEPRKGFMYSRNTNENPQECFNASKLLTSHGMGIQVPLNATEFNYLCPAIINQIDARSCLIHTSEKKAEIPPKTYSLQIAWVGGFIAISIISFLSLLGVILVPLMNRVFFKFLLSFLVALAVGTLSGDAFLHLLPHSHASHHHSHSHEEPAMEMKRGPLFSHLSSQNIEESAYFDSTWKGLTALGGLYFMFLVEHVLTLIKQFKDKKKKNQKKPENDDDVEIKKQLSKYESQLSTNEEKVDTDDRTEGYLRADSQEPSHFDSQQPAVLEEEEVMIAHAHPQEVYNEYVPRGCKNKCHSHFHDTLGQSDDLIHHHHDYHHILHHHHHQNHHPHSHSQRYSREELKDAGVATLAWMVIMGDGLHNFSDGLAIGAAFTEGLSSGLSTSVAVFCHELPHELGDFAVLLKAGMTVKQAVLYNALSAMLAYLGMATGIFIGHYAENVSMWIFALTAGLFMYVALVDMVPEMLHNDASDHGCSRWGYFFLQNAGMLLGFGIMLLISIFEHKIVFRINF

SEQ ID NO: 113 - DNA, 3445 bp, Homo sapiens
  misc_feature (160)..(160): Wherein n may be a, c, g or t
caccgcgtgttcgcgcctggtagagatttctcgaagacaccagtgggcccgtgtggaaccaaacctgcgcgcgtggccgggccgtgggacaacgaggccgcggagacgaaggcgcaatggcgaggaagttatctgtaatcttgatcctgacctttgcccnctctgtcacaaatccccttcatgaactaaaagcagctgctttcccccagaccactgagaaaattagtccgaattgggaatctggcattaatgttgacttggcaatttccacacggcaatatcatctacaacagcttttctaccgctatggagaaaataattctttgtcagttgaagggttcagaaaattacttcaaaatataggcatagataagattaaaagaatccatatacaccatgaccacgaccatcactcagaccacgagcatcactcagaccatgagcgtcactcagaccatgagcatcactcagagcacgagcatcactctgaccatgatcatcactctcaccataatcatgctgcttctggtaaaaataagcgaaaagctctttgcccagaccatgactcagatagttcaggtaaagatcctagaaacagccaggggaaaggagctcaccgaccagaacatgccagtggtagaaggaatgtcaaggacagtgttagtgctagtgaagtgacctcaactgtgtacaacactgtctctgaaggaactcactttctagagacaatagagactccaagacctggaaaactcttccccaaagatgtaagcagctccactccacccagtgtcacatcaaagagccgggtgagccggctggctggtaggaaaacaaatgaatctgtgagtgagccccgaaaaggctttatgtattccagaaacacaaatgaaaatcctcaggagtgtttcaatgcatcaaagctactgacatctcatggcatgggcatccaggttccgctgaatgcaacagagttcaactatctctgtccagccatcatcaaccaaattgatgctagatcttgtctgattcatacaagtgaaaagaaggctgaaatccctccaaagacctattcattacaaatagcctgggttggtggttttatagccatttccatcatcagtttcctgtctctgctgggggttatcttagtgcctctcatgaatcgggtgtttttcaaatttctcctgagtttccttgtggcactggccgttgggactttgagtggtgatgcttttttacaccttcttccacattctcatgcaagtcaccaccatagtcatagccatgaagaaccagcaatggaaatgaaaagaggaccacttttcagtcatctgtcttctcaaaacatagaagaaagtgcctattttgattccacgtggaagggtctaacagctctaggaggcctgtatttcatgtttcttgttgaacatgtcctcacattgatcaaacaatttaaagataagaagaaaaagaatcagaagaaacctgaaaatgatgatgatgtggagattaagaagcagttgtccaagtatgaatctcaactttcaacaaatgaggagaaagtagatacagatgatcgaactgaaggctatttacgagcagactcacaagagccctcccactttgattctcagcagcctgcagtcttggaagaagaagaggtcatgatagctcatgctcatccacaggaagtctacaatgaatatgtacccagagggtgcaagaataaatgccattcacatttccacgatacactcggccagtcagacgatctcattcaccaccatcatgactaccatcatattctccatcatcaccaccaccaaaaccaccatcctcacagtcacagccagcgctactctcgggaggagctgaaagatgccggcgtcgccactctggcctggatggtgataatgggtgatggcctgcacaatttcagcgatggcctagcaattggtgctgcttttactgaaggcttatcaagtggtttaagtacttctgttgctgtgttctgtcatgagttgcctcatgaattaggtgactttgctgttctactaaaggctggcatgaccgttaagcaggctgtcctttataatgcattgtcagccatgctggcgtatcttggaatggcaacaggaattttcattggtcattatgctgaaaatgtttctatgtggatatttgcacttactgctggcttattcatgtatgttgctctggttgatatggtacctgaaatgctgcacaatgatgctagtgaccatggatgtagccgctgggggtatttctttttacagaatgctgggatgcttttgggttttggaattatgttacttatttccatatttgaacataaaatcgtgtttcgtataaatttctagttaaggtttaaatgctagagtagcttaaaaagttgtcatagtttcagtaggtcatagggagatgagtttgtatgctgtactatgcagcgtttaaagttagtgggttttgtgatttttgtattgaatattgctgtctgttacaaagtcagttaaaggtacgttttaatatttaagttattctatcttggagataaaatctgtatgtgcaattcaccggtattaccagtttattatgtaaacaagagatttggcatgacatgttctgtatgtttcagggaaaaatgtctttaatgctttttcaagaactaacacagttattcctatactggattttaggtctctgaagaactgctggtgtttaggaataagaatgtgcatgaagcctaaaataccaagaaagcttatactgaatttaagcaaagaaataaaggagaaaagagaagaatctgagaattggggaggcatagattcttataaaaatcacaaaatttgttgtaaattagaggggagaaatttagaattaagtataaaaaggcagaattagtatagagtacattcattaaacatttttgtcaggattatttcccgtaaaaacgtagtgagcacttttcatatactaatttagttgtacatttaactttgtataatacagaaatctaaatatatttaatgaattcaagcaatatatcacttgaccaagaaattggaatttcaaaatgttcgtgcgggtatataccagatgagtacagtgagtagttttatgtatcaccagactgggttattgccaagttatatatcaccaaaagctgtatgactggatgttctggttacctggtttacaaaattatcagagtagtaaaactttgatatatatgaggatattaaaactacactaagtatcatttgattcgattcagaaagtactttgatatctctcagtgcttcagtgctatcattgtgagcaattgtcttttatatacggtacgtagccatactaggcctgtctgtggcattctctagatgtttcttttttacacaataaattccttatatcagcttgt

SEQ ID NO: 114 - protein, 755 aa, Homo sapiens
  misc_feature (15)..(15): Wherein Xaa may be any naturally occurring amino acid
MARKLSVILILTFAXSVTNPLHELKAAAFPQTTEKISPNWESGINVDLAISTRQYHLQQLFYRYGENNSLSVEGFRKLLQNIGIDKIKRIHIHHDHDHHSDHEHHSDHERHSDHEHHSEHEHHSDHDHHSHHNHAASGKNKRKALCPDHDSDSSGKDPRNSQGKGAHRPEHASGRRNVKDSVSASEVTSTVYNTVSEGTHFLETIETPRPGKLFPKDVSSSTPPSVTSKSRVSRLAGRKTNESVSEPRKGFMYSRNTNENPQECFNASKLLTSHGMGIQVPLNATEFNYLCPAIINQIDARSCLIHTSEKKAEIPPKTYSLQIAWVGGFIAISIISFLSLLGVILVPLMNRVFFKFLLSFLVALAVGTLSGDAFLHLLPHSHASHHHSHSHEEPAMEMKRGPLFSHLSSQNIEESAYFDSTWKGLTALGGLYFMFLVEHVLTLIKQFKDKKKKNQKKPENDDDVEIKKQLSKYESQLSTNEEKVDTDDRTEGYLRADSQEPSHFDSQQPAVLEEEEVMIAHAHPQEVYNEYVPRGCKNKCHSHFHDTLGQSDDLIHHHHDYHHILHHHHHQNHHPHSHSQRYSREELKDAGVATLAWMVIMGDGLHNFSDGLAIGAAFTEGLSSGLSTSVAVFCHELPHELGDFAVLLKAGMTVKQAVLYNALSAMLAYLGMATGIFIGHYAENVSMWIFALTAGLFMYVALVDMVPEMLHNDASDHGCSRWGYFFLQNAGMLLGFGIMLLISIFEHKIVFRINF

SEQ ID NO: 115 - DNA, 3802 bp, Homo sapiens
  CDS (732)..(2609)
ataaatgacgtgccgagagagcgagcgaacgcgcagccgggagagcggagtctcctgcctcccgccccccacccctccagctcctgctcctcctccgctccccatacacagacgcgctcacacccgctccctcactcgaacacacagacacaagcgcgcacacaggctccgcacacacacacttcgctctcccgcgcgctcacacccctcttgccctgagcccttgccggtgcagcgcggcgccgcagctggacgcccctcccgggctcactttgcaacgctgacggtgccggcagtggccgtggaggtgggaacagcggcggcatcctcccccctggtcacagcccaagccaggacgcccgcggaacctctcggctgtgctctcccatgagtcgggatcgcagcatcccccaccagccgctcaccgcctccgggagccgctgggcttgtacaccgcagcccttccgggacagcagctgtgactcccccccagtgcagatttcgggacagctctctagaaactcgctctaaagacggaaccgccacagcactcaaagcccactgcggaagagggcagcccggcaagcccgggccctgagcctggacccttagcggtgccgggcagcactgccggcgcttcgcctcgccggacgtccgctcctcctacactctcagcctccgctggagagacccccagccccaccattcagcgcgcaagataccctccagatatgccctgcgtccaagcccaatatagcccttcccctccaggttccagttatgcggcgcagacatacagctcggaatacaccacggagatcatgaaccccgactacaccaagctgaccatggaccttggcagcactgagatcacggctacagccaccacgtccctgcccagcatcagtaccttcgtggagggctactcgagcaactacgaactcaagccttcctgcgtgtaccaaatgcagcggcccttgatcaaagtggaggaggggcgggcgcccagctaccatcaccatcaccaccaccaccaccaccaccaccaccatcaccagcagcagcatcagcagccatccattcctccagcctccagcccggaggacgaggtgctgcccagcacctccatgtacttcaagcagtccccaccgtccacccccaccacgccggccttccccccgcaggcgggggcgttatgggacgaggcactgccctcggcgcccggctgcatcgcacccggcccgctgctggacccgccgatgaaggcggtccccacggtggccggcgcgcgcttcccgctcttccacttcaagccctcgccgccgcatccccccgcgcccagcccggccggcggccaccacctcggctacgacccgacggccgctgccgcgctcagcctgccgctgggagccgcagccgccgcgggcagccaggccgccgcgcttgagggccacccgtacgggctgccgctggccaagagggcggccccgctggccttcccgcctctcggcctcacgccctcccctaccgcgtccagcctgctgggcgagagtcccagcctgccgtcgccgcccagcaggagctcgtcgtctggcgagggcacgtgtgccgtgtgcggggacaacgccgcctgccagcactacggcgtgcgaacctgcgagggctgcaagggctttttcaagagaacagtgcagaaaaatgcaaaatatgtttgcctggcaaataaaaactgcccagtagacaagagacgtcgaaaccgatgtcagtactgtcgatttcagaagtgtctcagtgttggaatggtaaaagaagttgtccgtacagatagtctgaaagggaggagaggtcgtctgccttccaaaccaaagagcccattacaacaggaaccttctcagccctctccaccttctcctccaatctgcatgatgaatgctcttgtccgagctttaacagactcaacacccagagatcttgattattccagatactgtcccactgaccaggctgctgcaggcacagatgctgagcatgtgcaacaattctacaacctcctgacagcctccattgatgtatccagaagctgggcagaaaggattccgggatttactgatctccccaaagaagatcagacattacttattgaatcagcctttttggagctgtttgtcctcagactttccatcaggtcaaacactgctgaagataagtttgtgttctgcaatggacttgtcctgcatcgacttcagtgccttcgtggatttggggagtggctcgactctattaaagacttttccttaaatttgcagagcctgaaccttgatatccaagccttagcctgcctgtcagcactgagcatgatcacagaaagacatgggttaaaagaaccaaagagagtcgaagagctatgcaacaagatcacaagcagtttaaaagaccaccagagtaagggacaggctctggaacccaacgagtccaaggtcctggttgccctggtagaactgaggaagatctgcaccctgggcctccagcgcatcttctacctgaagctggaagacttggtgtctccaccttccatcattgacaagctcttcctggacaccctacctttctaatcaggagcagtggagcagtgagctgcctcctctcctagcaccctgcttctacgcagcaaagggataggtttggaaacctatcatttcctgtccttccttaagaggaaaagcagctcctgtagaaagcaaagactttcttttttttctggctcttttccttacaacctaaagccagaaaacttgcagagtattgtgttggggttgtgttttatatttaggcattgggggatggggtgggagggggttatagttcatgagggttttctaagaaattgctaacaaagcacttttggacaatgctatcccagcaggaaaaaaaaggataatataactgttttaaaactctttctggggaatccaattatagttgctttgtatttaaaaacaagaacagccaagggttgttcgccagggtaggatgtgtcttaaagattggtcccttgaaaatatgcttcctgtatcaaaggtacgtatgtggtgcaaacaaggcagaaacttccttttaatttccttcttcctttattttaacaaatggtgaaagatggaggattacctacaaatcagacatggcaaaacaataatggctgtttgcttccataaacaagtgcaattttttaaagtgctgtcttactaagtcttgtttattaactctcctttattctatatggaaataaaaaggaggcagtcatgttagcaaatgacacgttaatatccctagcagaggctgtgttcaccttccctgtcgatcccttctgaggtatggcccatccaagacttttaggccattcttgatggaaccagatccctgccctgactgtccagctatcctgaaagtggatcagattataaactggattacatgtaactgttttggttgtgttctatcaaccccaccagagttccctaaacttgcttcagttatagtaactgactggtatattcattcagaagcgccataagtcagttgagtatttgatccctagataagaacatgcaaatcagcaggaactggtcatacagggtaagcaccagggacaataaggatttttatagatataatttaatttttggtaattgggttaaggagaccaattttggagagcaagcaaatcttctttttaaaaaatagtatgaatgtgaatactagaaaagatttaagaaatagtatgagtgtgagtactaggaaggat

SEQ ID NO: 116 - protein, 626 aa, Homo sapiens
MPCVQAQYSPSPPGSSYAAQTYSSEYTTEIMNPDYTKLTMDLGSTEITATATTSLPSISTFVEGYSSNYELKPSCVYQMQRPLIKVEEGRAPSYHHHHHHHHHHHHHHQQQHQQPSIPPASSPEDEVLPSTSMYFKQSPPSTPTTPAFPPQAGALWDEALPSAPGCIAPGPLLDPPMKAVPTVAGARFPLFHFKPSPPHPPAPSPAGGHHLGYDPTAAAALSLPLGAAAAAGSQAAALEGHPYGLPLAKRAAPLAFPPLGLTPSPTASSLLGESPSLPSPPSRSSSSGEGTCAVCGDNAACQHYGVRTCEGCKGFFKRTVQKNAKYVCLANKNCPVDKRRRNRCQYCRFQKCLSVGMVKEVVRTDSLKGRRGRLPSKPKSPLQQEPSQPSPPSPPICMMNALVRALTDSTPRDLDYSRYCPTDQAAAGTDAEHVQQFYNLLTASIDVSRSWAERIPGFTDLPKEDQTLLIESAFLELFVLRLSIRSNTAEDKFVFCNGLVLHRLQCLRGFGEWLDSIKDFSLNLQSLNLDIQALACLSALSMITERHGLKEPKRVEELCNKITSSLKDHQSKGQALEPNESKVLVALVELRKICTLGLQRIFYLKLEDLVSPPSIIDKLFLDTLPF

SEQ ID NO: 117 - DNA, 3864 bp, Homo sapiens
  CDS (2)..(3814)
gtgccctgaccagagccctgagttgcaaccctggaaccctggccatgaccaagaccaccatgtgcatatcggccagggcaagacactgctgctcacctcttctgccacggtctattccatccacatctcagagggaggcaagctggtcattaaagaccacgacgagccgattgttttgcgaacccggcacatcctgattgacaacggaggagagctgcatgctgggagtgccctctgccctttccagggcaatttcaccatcattttgtatggaagggctgatgaaggtattcagccggatccttactatggtctgaagtacattggggttggtaaaggaggcgctcttgagttgcatggacagaaaaagctctcctggacatttctgaacaagacccttcacccaggtggcatggcagaaggaggctatttttttgaaaggagctggggccaccgtggagttattgttcatgtcatcgaccccaaatcaggcacagtcatccattctgaccggtttgacacctatagatccaagaaagagagtgaacgtctggtccagtatttgaacgcggtgcccgatggcaggatcctttctgttgcagtgaatgatgaaggttctcgaaatctggatgacatggccaggaaggcgatgaccaaattgggaagcaaacacttcctgcaccttggatttagggtggagtggacggagtggttcgatcatgataaagtatctcagactaaaggtggggagaaaatttcagacctctggaaagctcacccaggaaaaatatgcaatcgtcccattgatatacagcaggccactacaatggatggagttaacctcagcaccgaggttgtctacaaaaaaggccaggattataggtttgcttgctacgaccggggcagagcctgccggagctaccgtgtacggttcctctgtgggaagcctgtgaggcccaaactcacagtcaccattgacaccaatgtgaacagcaccattctgaacttggaggataatgtacagtcatggaaacctggagataccctggtcattgccagtactgattactccatgtaccaggcagaagagttccaggtgcttccctgcagatcctgcgcccccaaccaggtcaaagtggcagggaaaccaatgtacctgcacatcggggaggagatagacggcgtggacatgcgggcggaggttgggcttctgagccggaacatcatagtgatgggggagatggaggacaaatgctacccctacagaaaccacatctgcaatttctttgacttcgatacctttgggggccacatcaagtttgctctgggatttaaggcagcacacttggagggcacggagctgaagcatatgggacagcagctggtgggtcagtacccgattcacttccacctggccggtgatgtagacgaaaggggaggttatgacccacccacatacatcagggacctctccatccatcatacattctctcgctgcgtcacagtccatggctccaatggcttgttgatcaaggacgttgtgggctataactctttgggccactgcttcttcacggaagatgggccggaggaacgcaacacttttgaccactgtcttggcctccttgtcaagtctggaaccctcctcccctcggaccgtgacagcaagatgtgcaagatgatcacagaggactcctacccagggtacatccccaagcccaggcaagactgcaatgctgtgtccaccttctggatggccaatcccaacaacaacctcatcaactgtgccgctgcaggatctgaggaaactggattttggtttatttttcaccacgtaccaacgggcccctccgtgggaatgtactccccaggttattcagagcacattccactgggaaaattctataacaaccgagcacattccaactaccgggctggcatgatcatagacaacggagtcaaaaccaccgaggcctctgccaaggacaagcggccgttcctctcaatcatctctgccagatacagccctcaccaggacgccgacccgctgaagccccgggagccggccatcatcagacacttcattgcctacaagaaccaggaccacggggcctggctgcgcggcggggatgtgtggctggacagctgccggtttgctgacaatggcattggcctgaccctggccagtggtggaaccttcccgtatgacgacggctccaagcaagagataaagaacagcttgtttgttggcgagagtggcaacgtggggacggaaatgatggacaataggatctggggccctggcggcttggaccatagcggaaggaccctccctataggccagaattttccaattagaggaattcagttatatgatggccccatcaacatccaaaactgcactttccgaaagtttgtggccctggagggccggcacaccagcgccctggccttccgcctgaataatgcctggcagagctgcccccataacaacgtgaccggcattgcctttgaggacgttccgattacttccagagtgttcttcggagagcctgggccctggttcaaccagctggacatggatggggataagacatctgtgttccatgacgtcgacggctccgtgtccgagtaccctggctcctacctcacgaagaatgacaactggctggtccggcacccagactgcatcaatgttcccgactggagaggggccatttgcagtgggtgctatgcacagatgtacattcaagcctacaagaccagtaacctgcgaatgaagatcatcaagaatgacttccccagccaccctctttacctggagggggcgctcaccaggagcacccattaccagcaataccaaccggttgtcaccctgcagaagggctacaccatccactgggaccagacggcccccgccgaactcgccatctggctcatcaacttcaacaagggcgactggatccgagtggggctctgctacccgcgaggcaccacattctccatcctctcggatgttcacaatcgcctgctgaagcaaacgtccaagacgggcgtcttcgtgaggaccttgcagatggacaaagtggagcagagctaccctggcaggagccactactactgggacgaggactcagggctgttgttcctgaagctgaaagctcagaacgagagagagaagtttgctttctgctccatgaaaggctgtgagaggataaagattaaagctctgattccaaagaacgcaggcgtcagtgactgcacagccacagcttaccccaagttcaccgagagggctgtcgtagacgtgccgatgcccaagaagctctttggttctcagctgaaaacaaaggaccatttcttggaggtgaagatggagagttccaagcagcacttcttccacctctggaacgacttcgcttacattgaagtggatgggaagaagtaccccagttcggaggatggcatccaggtggtggtgattgacgggaaccaagggcgcgtggtgagccacacgagcttcaggaactccattctgcaaggcataccatggcagcttttcaactatgtggcgaccatccctgacaattccatagtgcttatggcatcaaagggaagatacgtctccagaggcccatggaccagagtgctggaaaagcttggggcagacaggggtctcaagttgaaagagcaaatggcattcgttggcttcaaaggcagcttccggcccatctgggtgacactggacactgaggatcacaaagccaaaatcttccaagttgtgcccatccctgtggtgaagaagaagaagttgtgaggacagctgccgcccggtgccacctcgtggtagactatgacggtgac

SEQ ID NO: 118 - protein, 1271 aa, Homo sapiens
CPDQSPELQPWNPGHDQDHHVHIGQGKTLLLTSSATVYSIHISEGGKLVIKDHDEPIVLRTRHILIDNGGELHAGSALCPFQGNFTIILYGRADEGIQPDPYYGLKYIGVGKGGALELHGQKKLSWTFLNKTLHPGGMAEGGYFFERSWGHRGVIVHVIDPKSGTVIHSDRFDTYRSKKESERLVQYLNAVPDGRILSVAVNDEGSRNLDDMARKAMTKLGSKHFLHLGFRVEWTEWFDHDKVSQTKGGEKISDLWKAHPGKICNRPIDIQQATTMDGVNLSTEVVYKKGQDYRFACYDRGRACRSYRVRFLCGKPVRPKLTVTIDTNVNSTILNLEDNVQSWKPGDTLVIASTDYSMYQAEEFQVLPCRSCAPNQVKVAGKPMYLHIGEEIDGVDMRAEVGLLSRNIIVMGEMEDKCYPYRNHICNFFDFDTFGGHIKFALGFKAAHLEGTELKHMGQQLVGQYPIHFHLAGDVDERGGYDPPTYIRDLSIHHTFSRCVTVHGSNGLLIKDVVGYNSLGHCFFTEDGPEERNTFDHCLGLLVKSGTLLPSDRDSKMCKMITEDSYPGYIPKPRQDCNAVSTFWMANPNNNLINCAAAGSEETGFWFIFHHVPTGPSVGMYSPGYSEHIPLGKFYNNRAHSNYRAGMIIDNGVKTTEASAKDKRPFLSIISARYSPHQDADPLKPREPAIIRHFIAYKNQDHGAWLRGGDVWLDSCRFADNGIGLTLASGGTFPYDDGSKQEIKNSLFVGESGNVGTEMMDNRIWGPGGLDHSGRTLPIGQNFPIRGIQLYDGPINIQNCTFRKFVALEGRHTSALAFRLNNAWQSCPHNNVTGIAFEDVPITSRVFFGEPGPWFNQLDMDGDKTSVFHDVDGSVSEYPGSYLTKNDNWLVRHPDCINVPDWRGAICSGCYAQMYIQAYKTSNLRMKIIKNDFPSHPLYLEGALTRSTHYQQYQPVVTLQKGYTIHWDQTAPAELAIWLINFNKGDWIRVGLCYPRGTTFSILSDVHNRLLKQTSKTGVFVRTLQMDKVEQSYPGRSHYYWDEDSGLLFLKLKAQNEREKFAFCSMKGCERIKIKALIPKNAGVSDCTATAYPKFTERAVVDVPMPKKLFGSQLKTKDHFLEVKMESSKQHFFHLWNDFAYIEVDGKKYPSSEDGIQVVVIDGNQGRVVSHTSFRNSILQGIPWQLFNYVATIPDNSIVLMASKGRYVSRGPWTRVLEKLGADRGLKLKEQMAFVGFKGSFRPIWVTLDTEDHKAKIFQVVPIPVVKKKKL

SEQ ID NO: 119 - DNA, 4205 bp, Homo sapiens
  CDS (22)..(4155)
attaatgaatataaaattattatgtactacacaattagtagaaagcatattttagagacacacctgccgcaaaatactcagtcaagggaaggggcgggtccgaatccaggggcgacgccgccgcctccgccagtgccccgggcgtcccgccgcctcactaagcgcctggagcgcgaggatcgctccactgcactccagcctgggcaacagagcgagactctgtctcaaaaaaaaaaaagaagtaaaaataattatgcagtatgtttagacattttaatatttgttttgatttcattttttcttcccttaaaaacaccccttggggagacttcggctgctgggtgccctgaccagagccctgagttgcaaccctggaaccctggccatgaccaagaccaccatgtgcatatcggccagggcaagacactgctgctcacctcttctgccacggtctattccatccacatctcagagggaggcaagctggtcattaaagaccacgacgagccgattgttttgcgaacccggcacatcctgattgacaacggaggagagctgcatgctgggagtgccctctgccctttccagggcaatttcaccatcattttgtatggaagggctgatgaaggtattcagccggatccttactatggtctgaagtacattggggttggtaaaggaggcgctcttgagttgcatggacagaaaaagctctcctggacatttctgaacaagacccttcacccaggtggcatggcagaaggaggctatttttttgaaaggagctggggccaccgtggagttattgttcatgtcatcgaccccaaatcaggcacagtcatccattctgaccggtttgacacctatagatccaagaaagagagtgaacgtctggtccagtatttgaacgcggtgcccgatggcaggatcctttctgttgcagtgaatgatgaaggttctcgaaatctggatgacatggccaggaaggcgatgaccaaattgggaagcaaacacttcctgcaccttggatttagggtggagtggacggagtggttcgatcatgataaagtatctcagactaaaggtggggagaaaatttcagacctctggaaagctcacccaggaaaaatatgcaatcgtcccattgatatacagcaggccactacaatggatggagttaacctcagcaccgaggttgtctacaaaaaaggccaggattataggtttgcttgctacgaccggggcagagcctgccggagctaccgtgtacggttcctctgtgggaagcctgtgaggcccaaactcacagtcaccattgacaccaatgtgaacagcaccattctgaacttggaggataatgtacagtcatggaaacctggagataccctggtcattgccagtactgattactccatgtaccaggcagaagagttccaggtgcttccctgcagatcctgcgcccccaaccaggtcaaagtggcagggaaaccaatgtacctgcacatcggggaggagatagacggcgtggacatgcgggcggaggttgggcttctgagccggaacatcatagtgatgggggagatggaggacaaatgctacccctacagaaaccacatctgcaatttctttgacttcgatacctttgggggccacatcaagtttgctctgggatttaaggcagcacacttggagggcacggagctgaagcatatgggacagcagctggtgggtcagtacccgattcacttccacctggccggtgatgtagacgaaaggggaggttatgacccacccacatacatcagggacctctccatccatcatacattctctcgctgcgtcacagtccatggctccaatggcttgttgatcaaggacgttgtgggctataactctttgggccactgcttcttcacggaagatgggccggaggaacgcaacacttttgaccactgtcttggcctccttgtcaagtctggaaccctcctcccctcggaccgtgacagcaagatgtgcaagatgatcacagaggactcctacccagggtacatccccaagcccaggcaagactgcaatgctgtgtccaccttctggatggccaatcccaacaacaacctcatcaactgtgccgctgcaggatctgaggaaactggattttggtttatttttcaccacgtaccaacgggcccctccgtgggaatgtactccccaggttattcagagcacattccactgggaaaattctataacaaccgagcacattccaactaccgggctggcatgatcatagacaacggagtcaaaaccaccgaggcctctgccaaggacaagcggccgttcctctcaatcatctctgccagatacagccctcaccaggacgccgacccgctgaagccccgggagccggccatcatcagacacttcattgcctacaagaaccaggaccacggggcctggctgcgcggcggggatgtgtggctggacagctgccggtttgctgacaatggcattggcctgaccctggccagtggtggaaccttcccgtatgacgacggctccaagcaagagataaagaacagcttgtttgttggcgagagtggcaacgtggggacggaaatgatggacaataggatctggggccctggcggcttggaccatagcggaaggaccctccctataggccagaattttccaattagaggaattcagttatatgatggccccatcaacatccaaaactgcactttccgaaagtttgtggccctggagggccggcacaccagcgccctggccttccgcctgaataatgcctggcagagctgcccccataacaacgtgaccggcattgcctttgaggacgttccgattacttccagagtgttcttcggagagcctgggccctggttcaaccagctggacatggatggggataagacatctgtgttccatgacgtcgacggctccgtgtccgagtaccctggctcctacctcacgaagaatgacaactggctggtccggcacccagactgcatcaatgttcccgactggagaggggccatttgcagtgggtgctatgcacagatgtacattcaagcctacaagaccagtaacctgcgaatgaagatcatcaagaatgacttccccagccaccctctttacctggagggggcgctcaccaggagcacccattaccagcaataccaaccggttgtcaccctgcagaagggctacaccatccactgggaccagacggcccccgccgaactcgccatctggctcatcaacttcaacaagggcgactggatccgagtggggctctgctacccgcgaggcaccacattctccatcctctcggatgttcacaatcgcctgctgaagcaaacgtccaagacgggcgtcttcgtgaggaccttgcagatggacaaagtggagcagagctaccctggcaggagccactactactgggacgaggactcagggctgttgttcctgaagctgaaagctcagaacgagagagagaagtttgctttctgctccatgaaaggctgtgagaggataaagattaaagctctgattccaaagaacgcaggcgtcagtgactgcacagccacagcttaccccaagttcaccgagagggctgtcgtagacgtgccgatgcccaagaagctctttggttctcagctgaaaacaaaggaccatttcttggaggtgaagatggagagttccaagcagcacttcttccacctctggaacgacttcgcttacattgaagtggatgggaagaagtaccccagttcggaggatggcatccaggtggtggtgattgacgggaaccaagggcgcgtggtgagccacacgagcttcaggaactccattctgcaaggcataccatggcagcttttcaactatgtggcgaccatccctgacaattccatagtgcttatggcatcaaagggaagatacgtctccagaggcccatggaccagagtgctggaaaagcttggggcagacaggggtctcaagttgaaagagcaaatggcattcgttggcttcaaaggcagcttccggcccatctgggtgacactggacactgaggatcacaaagccaaaatcttccaagttgtgcccatccctgtggtgaagaagaagaagttgtgaggacagctgccgcccggtgccacctcgtggtagactatgacggtgac

SEQ ID NO: 120 - protein, 1378 aa, Homo sapiens
MYYTISRKHILETHLPQNTQSREGAGPNPGATPPPPPVPRASRRLTKRLEREDRSTALQPGQQSETLSQKKKRSKNNYAVCLDILIFVLISFFLPLKTPLGETSAAGCPDQSPELQPWNPGHDQDHHVHIGQGKTLLLTSSATVYSIHISEGGKLVIKDHDEPIVLRTRHILIDNGGELHAGSALCPFQGNFTIILYGRADEGIQPDPYYGLKYIGVGKGGALELHGQKKLSWTFLNKTLHPGGMAEGGYFFERSWGHRGVIVHVIDPKSGTVIHSDRFDTYRSKKESERLVQYLNAVPDGRILSVAVNDEGSRNLDDMARKAMTKLGSKHFLHLGFRVEWTEWFDHDKVSQTKGGEKISDLWKAHPGKICNRPIDIQQATTMDGVNLSTEVVYKKGQDYRFACYDRGRACRSYRVRFLCGKPVRPKLTVTIDTNVNSTILNLEDNVQSWKPGDTLVIASTDYSMYQAEEFQVLPCRSCAPNQVKVAGKPMYLHIGEEIDGVDMRAEVGLLSRNIIVMGEMEDKCYPYRNHICNFFDFDTFGGHIKFALGFKAAHLEGTELKHMGQQLVGQYPIHFHLAGDVDERGGYDPPTYIRDLSIHHTFSRCVTVHGSNGLLIKDVVGYNSLGHCFFTEDGPEERNTFDHCLGLLVKSGTLLPSDRDSKMCKMITEDSYPGYIPKPRQDCNAVSTFWMANPNNNLINCAAAGSEETGFWFIFHHVPTGPSVGMYSPGYSEHIPLGKFYNNRAHSNYRAGMIIDNGVKTTEASAKDKRPFLSIISARYSPHQDADPLKPREPAIIRHFIAYKNQDHGAWLRGGDVWLDSCRFADNGIGLTLASGGTFPYDDGSKQEIKNSLFVGESGNVGTEMMDNRIWGPGGLDHSGRTLPIGQNFPIRGIQLYDGPINIQNCTFRKFVALEGRHTSALAFRLNNAWQSCPHNNVTGIAFEDVPITSRVFFGEPGPWFNQLDMDGDKTSVFHDVDGSVSEYPGSYLTKNDNWLVRHPDCINVPDWRGAICSGCYAQMYIQAYKTSNLRMKIIKNDFPSHPLYLEGALTRSTHYQQYQPVVTLQKGYTIHWDQTAPAELAIWLINFNKGDWIRVGLCYPRGTTFSILSDVHNRLLKQTSKTGVFVRTLQMDKVEQSYPGRSHYYWDEDSGLLFLKLKAQNEREKFAFCSMKGCERIKIKALIPKNAGVSDCTATAYPKFTERAVVDVPMPKKLFGSQLKTKDHFLEVKMESSKQHFFHLWNDFAYIEVDGKKYPSSEDGIQVVVIDGNQGRVVSHTSFRNSILQGIPWQLFNYVATIPDNSIVLMASKGRYVSRGPWTRVLEKLGADRGLKLKEQMAFVGFKGSFRPIWVTLDTEDHKAKIFQVVPIPVVKKKKL

SEQ ID NO: 121 - DNA, 610 bp, Homo sapiens
  CDS (11)..(610)
caccagatcttgccctgaccagagccctgagttgcaaccctggaaccctggccatgaccaagaccaccatgtgcatatcggccagggcaagacactgctgctcacctcttctgccacggtctattccatccacatctcagagggaggcaagctggtcattaaagaccacgacgagccgattgttttgcgaacccggcacatcctgattgacaacggaggagagctgcatgctgggagtgccctctgccctttccagggcaatttcaccatcattttgtatggaagggctgatgaaggtattcagccggatccttactatggtctgaagtacattggggttggtaaaggaggcgctcttgagttgcatggacagaaaaagctctcctggacatttctgaacaagacccttcacccaggtggcatggcagaaggaggctatttttttgaaaggagctggggccaccgtggagttattgttcatgtcatcgaccccaaatcaggcacagtcatccattctgaccggtttgacacctatagatccaagaaagagagtgaacgtctggtccagtatttgaacgcggtgcccgatggcaggatcctttctgttgca

SEQ ID NO: 122 - protein, 200 aa, Homo sapiens
CPDQSPELQPWNPGHDQDHHVHIGQGKTLLLTSSATVYSIHISEGGKLVIKDHDEPIVLRTRHILIDNGGELHAGSALCPFQGNFTIILYGRADEGIQPDPYYGLKYIGVGKGGALELHGQKKLSWTFLNKTLHPGGMAEGGYFFERSWGHRGVIVHVIDPKSGTVIHSDRFDTYRSKKESERLVQYLNAVPDGRILSVA

SEQ ID NO: 123 - DNA, 366 bp, Homo sapiens
  CDS (1)..(366)
gatgggaagaagtaccccagttcggaggatggcatccaggtggtggtgattgacgggaaccaagggcgcgtggtgagccacacgagcttcaggaactccattctgcaaggcataccatggcagcttttcaactatgtggcgaccatccctgacaattccatagtgcttatggcatcaaagggaagatacgtctccagaggcccatggaccagagtgctggaaaagcttggggcagacaggggtctcaagttgaaagagcaaatggcattcgttggcttcaaaggcagcttccggcccatctgggtgacactggacactgaggatcacaaagccaaaatcttccaagttgtgcccatccctgtggtg

SEQ ID NO: 124 - protein, 122 aa, Homo sapiens
DGKKYPSSEDGIQVVVIDGNQGRVVSHTSFRNSILQGIPWQLFNYVATIPDNSIVLMASKGRYVSRGPWTRVLEKLGADRGLKLKEQMAFVGFKGSFRPIWVTLDTEDHKAKIFQVVPIPVV

SEQ ID NO: 125 - DNA, 772 bp, Homo sapiens
  CDS (11)..(763)
caccagatctcatgtgcatatcggccagggcaagacactgctgctcacctcttctgccacggtctattccatccacatctcagagggaggcaagctggtcattaaagaccacgacgagccgattgttttgcgaacccggcacatcctgattgacaacggaggagagctgcatgctgggagtgccctctgccctttccagggcaatttcaccatcattttgtatggaagggctgatgaaggtattcagccggatccttactatggtctgaagtacattggggttggtaaaggaggcgctcttgagttgcatggacagaaaaagctctcctggacatttctgaacaagacccttcacccaggtggcatggcagaaggaggctatttttttgaaaggagctggggccaccgtggagttattgttcatgtcatcgaccccaaatcaggcacagtcatccattctgaccggtttgacacctatagatccaagaaagagagtgaacgtctggtccagtatttgaacgcggtgcccgatggcaggatcctttctgttgcagtgaatgatgaaggttctcgaaatctggatgacatggccaggaaggcgatgaccaaattgggaagcaaacacttcctgcaccttggatttagacacccttggagttttctaactgtgaaaggaaatccatcatcttcagtggaagaccatattgaatatcatggacatcgaggctctgctgctgcccgggtattcaaattgttccagacactcgagggc

SEQ ID NO: 126 - protein, 251 aa, Homo sapiens
HVHIGQGKTLLLTSSATVYSIHISEGGKLVIKDHDEPIVLRTRHILIDNGGELHAGSALCPFQGNFTIILYGRADEGIQPDPYYGLKYIGVGKGGALELHGQKKLSWTFLNKTLHPGGMAEGGYFFERSWGHRGVIVHVIDPKSGTVIHSDRFDTYRSKKESERLVQYLNAVPDGRILSVAVNDEGSRNLDDMARKAMTKLGSKHFLHLGFRHPWSFLTVKGNPSSSVEDHIEYHGHRGSAAARVFKLFQT

SEQ ID NO: 127 - DNA, 1309 bp, Homo sapiens
  CDS (11)..(1300)
caccagatctgatcatgataaagtatctcagactaaaggtggggagaaaatttcagacctctggaaagctcacccaggaaaaatatgcaatcgtcccattgatatacaggccactacaatggatggagttaacctcagcaccgaggttgtctacaaaaaaggccaggattataggtttgcttgctacgaccggggcagagcctgccggagctaccgtgtacggttcctctgtgggaagcctgtgaggcccaaactcacagtcaccattgacaccaatgtgaacagcaccattctgaacttggaggataatgtacagtcatggaaacctggagataccctggtcattgccagtactgattactccatgtaccaggcagaagagttccaggtgcttccctgcagatcctgcgcccccaaccaggtcaaagtggcagggaaaccaatgtacctgcacatcggggaggagatagacggcgtggacatgcgggcggaggttgggcttctgagccggaacatcatagtgatgggggagatggaggacaaatgctacccctacagaaaccacatctgcaatttctttgacttcgatacctttgggggccacatcaagtttgctctgggatttaaggcagcacacttggagggcacggagctgaagcatatgggacagcagctggtgggtcagtacccgattcacttccacctggccggtgatgtagacgaaaggggaggttatgacccacccacatacatcagggacctctccatccatcatacattctctcgctgcgtcacagtccatggctccaatggcttgttgatcaaggacgttgtgggctataactctttgggccactgcttcttcacggaagatgggccggaggaacgcaacacttttgaccactgccttggcctccttgtcaagtctggaaccctcctcccctcggaccgtgacagcaagatgtgcaagatgatcacagaggactcctacccagggtacatccccaagcccaggcaagactgcaatgctgtgtccaccttctggatggccaatcccaacaacaacctcatcaactgtgccgctgcaggatctgaggaaactggattttggtttatttttcaccacgtaccaacgggcccctccgtgggaatgtactccccaggttattcagagcacattccactgggaaaattctataacaaccgagcacattccaactaccgggctggcatgatcatagacaacggagtcaaaaccaccgaggcctctgccaaggacaagcggccgttcctctcaatcctcgagggc

SEQ ID NO: 128 - protein, 430 aa, Homo sapiens
DHDKVSQTKGGEKISDLWKAHPGKICNRPIDIQATTMDGVNLSTEVVYKKGQDYRFACYDRGRACRSYRVRFLCGKPVRPKLTVTIDTNVNSTILNLEDNVQSWKPGDTLVIASTDYSMYQAEEFQVLPCRSCAPNQVKVAGKPMYLHIGEEIDGVDMRAEVGLLSRNIIVMGEMEDKCYPYRNHICNFFDFDTFGGHIKFALGFKAAHLEGTELKHMGQQLVGQYPIHFHLAGDVDERGGYDPPTYIRDLSIHHTFSRCVTVHGSNGLLIKDVVGYNSLGHCFFTEDGPEERNTFDHCLGLLVKSGTLLPSDRDSKMCKMITEDSYPGYIPKPRQDCNAVSTFWMANPNNNLINCAAAGSEETGFWFIFHHVPTGPSVGMYSPGYSEHIPLGKFYNNRAHSNYRAGMIIDNGVKTTEASAKDKRPFLSI

SEQ ID NO: 129 - DNA, 1081 bp, Homo sapiens
  CDS (11)..(1072)
caccagatctgcctacaagaccagtaacctgcgaatgaagatcatcaagaatgacttccccagccaccctctttacctggagggggcgctcaccaggagcacccattaccagcaataccaaccggttgtcaccctgcagaagggctacaccatccactgggaccagacggcccccgccgaactcgccatctggctcatcaacttcaacaagggcgactggatccgagtggggctctgctacccgcgaggcaccacattctccatcctctcggatgttcacaatcgcctgctgaagcaaacgtccaagacgggcgtcttcgtgaggaccttgcagatggacaaagtggagcagagctaccctggcaggagccactactactgggacgaggactcagggctgttgttcctgaagctgaaagctcagaacgagagagagaagtttgctttctgctccatgaaaggctgtgagaggataaagattaaagctctgattccaaagaacgcaggcgtcagtgactgcacagccacagcttaccccaagttcaccgagagggctgtcgtagacgtgccgatgcccaagaagctctttggttctcagctgaaaacaaaggaccatttcttggaggtgaagatggagagttccaagcagcacttcttccacctctggaacgacttcgcttacattgaagtggatgggaagaagtaccccagttcggaggatggcatccaggtggtggtgattgacgggaaccaagggcgcgtggtgagccacacgagcttcaggaactccattctgcaaggcataccatggcagcttttcaactatgtggcgaccatccctgacaattccatagtgcttatggcatcaaagggaagatacgtctccagaggcccatggaccagagtgctggaaaagcttggggcagacaggggtctcaagttgaaagagcaaatggcattcgttggcttcaaaggcagcttccggcccatctgggtgacactggacactgaggatcacaaagccaaaatcttccaagttgtgcccatccctgtggtgaagaagaagaagttgctcgagggc

SEQ ID NO: 130 - protein, 354 aa, Homo sapiens
AYKTSNLRMKIIKNDFPSHPLYLEGALTRSTHYQQYQPVVTLQKGYTIHWDQTAPAELAIWLINFNKGDWIRVGLCYPRGTTFSILSDVHNRLLKQTSKTGVFVRTLQMDKVEQSYPGRSHYYWDEDSGLLFLKLKAQNEREKFAFCSMKGCERIKIKALIPKNAGVSDCTATAYPKFTERAVVDVPMPKKLFGSQLKTKDHFLEVKMESSKQHFFHLWNDFAYIEVDGKKYPSSEDGIQVVVIDGNQGRVVSHTSFRNSILQGIPWQLFNYVATIPDNSIVLMASKGRYVSRGPWTRVLEKLGADRGLKLKEQMAFVGFKGSFRPIWVTLDTEDHKAKIFQVVPIPVVKKKKL

SEQ ID NO: 131 - DNA, 4108 bp, Homo sapiens
  CDS (17)..(4099)
cacctcgcgagccaggatgggagctgctgggaggcaggacttcctcttcaaggccatgctgaccatcagctggctcactctgacctgcttccctggggccacatccacagtggctgctgggtgccctgaccagagccctgagttgcaaccctggaaccctggccatgaccaagaccaccatgtgcatatcggccagggcaagacactgctgctcacctcttctgccacggtctattccatccacatctcagagggaggcaagctggtcattaaagaccacgacgagccgattgttttgcgaacccggcacatcctgattgacaacggaggagagctgcatgctgggagtgccctctgccctttccagggcaatttcaccatcattttgtatggaagggctgatgaaggtattcagccggatccttactatggtctgaagtacattggggttggtaaaggaggcgctcttgagttgcatggacagaaaaaactctcctggacatttctgaacaagacccttcacccaggtggcatggcagaaggaggctatttttttgaaaggagctggggccaccgtggagttattgttcatgtcatcgaccccaaatcaggcacagtcatccattctgaccggtttgacacctatagatccaagaaagagagtgaacgtctggtccagtatttgaacgcggtgcccgatggcaggatcctttctgttgcagtgaatgatgaaggttctcgaaatctggatgacatggccaggaaggcgatgaccaaattgggaagcaaacacttcctgcaccttggatttagacacccttggagttttctaactgtgaaaggaaatccatcatcttcagtggaagaccatattgaatatcatggacatcgaggctctgctgctgcccgggtattcaaattgttccagacagagcatggcgaatatttcaatgtttctttgtccagtgagtgggttcaagacgtggagtggacggagtggttcgatcatgataaagtatctcagactaaaggtggggagaaaatttcagacctctggaaagctcacccaggaaaaatatgcaatcgtcccattgatatacaggccactacaatggatggagttaacctcagcaccgaggttgtctacaaaaaaggccaggattataggtttgcttgctacgaccggggcagagcctgccggagctaccgtgtacggttcctctgtgggaagcctgtgaggcccaaactcacagtcaccattgacaccaatgtgaacagcaccattctgaacttggaggataatgtacagtcatggaaacctggagataccctggtcattgccagtactgattactccatgtaccaggcagaagagttccaggtgcttccctgcagatcctgcgcccccaaccaggtcaaagtggcagggaaaccaatgtacctgcacatcggggaggagatagacggcgtggacatgcgggcggaggttgggcttctgagccggaacatcatagtgatgggggagatggaggacaaatgctacccctacagaaaccacatctgcaatttctttgacttcgatacctttgggggccacatcaagtttgctctgggatttaaggcagcacacttggagggcacggagctgaagcatatgggacagcagctggtgggtcagtacccgattcacttccacctggccggtgatgtagacgaaaggggaggttatgacccacccacatacatcagggacctctccatccatcatacattctctcgctgcgtcacagtccatggctccaatggcttgttgatcaaggacgttgtgggctataactctttgggccactgcttcttcacggaagatgggccggaggaacgcaacacttttgaccactgtcttggcctccttgtcaagtctggaaccctcctcccctcggaccgtgacagcaagatgtgcaagatgatcacagaggactcctacccagggtacatccccaagcccaggcaagactgcaatgctgtgtccaccttctggatggccaatcccaacaacaacctcatcaactgtgccgctgcaggatctgaggaaactggattttggtttatttttcaccacgtaccaacgggcccctccgtgggaatgtactccccaggttattcagagcacattccactgggaaaattctataacaaccgagcacattccaactaccgggctggcatgatcatagacaacggagtcaaaaccaccgaggcctctgccaaggacaagcggccgttcctctcaatcatctctgccagatacagccctcaccaggacgccgacccgctgaagccccgggagccggccatcatcagacacttcattgcctacaagaaccaggaccgcggggcctggctgcgcggcggggatgtgtggctggacagctgccggtttgctgacaatggcattggcctgaccctggccagtggtggaaccttcccgtatgacgacggctccaagcaagagataaagaacagcttgtttgttggcgagagtggcaacgtggggacggaaatgatggacaataggatctggggccctggcggcttggaccatagcggaaggaccctccctataggccagaattttccaattagaggaattcagttatatgatggccccatcaacatcctaaactgcactttccgaaagtttgtggccctggagggccggcacaccagcgccctggccttccgcctgaataatgcctggcagagctgcccccataacaacgtgaccggcattgcctttgaggacgttccgattacttccagagtgttcttcggagagcctgggccctggttcaaccagctggacatggatggggataagacatctgtgttccatgacgtcgacggctccgtgtccgagtaccctggctcctacctcacgaagaatgacaactggctggtccggcacccagactgcatcaatgttcccgactggagaggggccatttgcagtgggtgctatgcacagatgtacattcaagcctacaagaccagtaacctgcgaatgaagatcatcaagaatgacttccccagccaccctctttacctggagggggcgctcaccaggagcacccattaccagcaataccaaccggttgtcaccctgcagaagggctacaccatccactgggaccagacggcccccgccgaactcgccatctggctcatcaacttcaacaagggcgactggatccgagtggggctctgctacccgcgaggcaccacattctccatcctctcggatgttcacaatcgcctgctgaagcaaacgtccaagacgggcgtcttcgtgaggaccttgcagatggacaaagtggagcagagctaccctggcaggagccactactactgggacgaggactcagggctgttgttcctgaagctgaaagctcagaacgagagagagaagtttgctttctgctccatgaaaggctgtgagaggataaagattaaagctctgattccaaagaacgcaggcgtcagtgactgcacagccacagcttaccccaagttcaccgagagggctgtcgtagacgtgccgatgcccaagaagctctttggttctcagctgaaaacaaaggaccatttcttggaggtgaagatggagagttccaagcagcacttcttccacctctggaacgacttcgcttacattgaagtggatgggaagaagtaccccagttcggaggatggcatccaggtggtggtgattgacgggaaccaagggcgcgtggtgagccacacgagcttcaggaactccattctgcaaggcataccatggcagcttttcaactatgtggcgaccatccctgacaattccatagtgcttatggcatcaaagggaagatacgtctccagaggcccatggaccagagtgctggaaaagcttggggcagacaggggtctcaagttgaaagagcaaatggcattcgttggcttcaaaggcagcttccggcccatctgggtgacactggacactgaggatcacaaagccaaaatcttccaagttgtgcccatccctgtggtgaagaagaagaagttgctcgagggc

SEQ ID NO: 132 - protein, 1361 aa, Homo sapiens
MGAAGRQDFLFKAMLTISWLTLTCFPGATSTVAAGCPDQSPELQPWNPGHDQDHHVHIGQGKTLLLTSSATVYSIHISEGGKLVIKDHDEPIVLRTRHILIDNGGELHAGSALCPFQGNFTIILYGRADEGIQPDPYYGLKYIGVGKGGALELHGQKKLSWTFLNKTLHPGGMAEGGYFFERSWGHRGVIVHVIDPKSGTVIHSDRFDTYRSKKESERLVQYLNAVPDGRILSVAVNDEGSRNLDDMARKAMTKLGSKHFLHLGFRHPWSFLTVKGNPSSSVEDHIEYHGHRGSAAARVFKLFQTEHGEYFNVSLSSEWVQDVEWTEWFDHDKVSQTKGGEKISDLWKAHPGKICNRPIDIQATTMDGVNLSTEVVYKKGQDYRFACYDRGRACRSYRVRFLCGKPVRPKLTVTIDTNVNSTILNLEDNVQSWKPGDTLVIASTDYSMYQAEEFQVLPCRSCAPNQVKVAGKPMYLHIGEEIDGVDMRAEVGLLSRNIIVMGEMEDKCYPYRNHICNFFDFDTFGGHIKFALGFKAAHLEGTELKHMGQQLVGQYPIHFHLAGDVDERGGYDPPTYIRDLSIHHTFSRCVTVHGSNGLLIKDVVGYNSLGHCFFTEDGPEERNTFDHCLGLLVKSGTLLPSDRDSKMCKMITEDSYPGYIPKPRQDCNAVSTFWMANPNNNLINCAAAGSEETGFWFIFHHVPTGPSVGMYSPGYSEHIPLGKFYNNRAHSNYRAGMIIDNGVKTTEASAKDKRPFLSIISARYSPHQDADPLKPREPAIIRHFIAYKNQDRGAWLRGGDVWLDSCRFADNGIGLTLASGGTFPYDDGSKQEIKNSLFVGESGNVGTEMMDNRIWGPGGLDHSGRTLPIGQNFPIRGIQLYDGPINILNCTFRKFVALEGRHTSALAFRLNNAWQSCPHNNVTGIAFEDVPITSRVFFGEPGPWFNQLDMDGDKTSVFHDVDGSVSEYPGSYLTKNDNWLVRHPDCINVPDWRGAICSGCYAQMYIQAYKTSNLRMKIIKNDFPSHPLYLEGALTRSTHYQQYQPVVTLQKGYTIHWDQTAPAELAIWLINFNKGDWIRVGLCYPRGTTFSILSDVHNRLLKQTSKTGVFVRTLQMDKVEQSYPGRSHYYWDEDSGLLFLKLKAQNEREKFAFCSMKGCERIKIKALIPKNAGVSDCTATAYPKFTERAVVDVPMPKKLFGSQLKTKDHFLEVKMESSKQHFFHLWNDFAYIEVDGKKYPSSEDGIQVVVIDGNQGRVVSHTSFRNSILQGIPWQLFNYVATIPDNSIVLMASKGRYVSRGPWTRVLEKLGADRGLKLKEQMAFVGFKGSFRPIWVTLDTEDHKAKIFQVVPIPVVKKKKL

SEQ ID NO: 133 - DNA, 3058 bp, Homo sapiens
  CDS (11)..(3052)
caccggtaccgctcacccaggaaaaatatgcaatcgtcccattgatatacaggccactacaatggatggagttaacctcagcaccgaggttgtctacaaaaaaggccaggattataggtttgcttgctacgaccggggcagagcctgccggagctaccgtgtacggttcctctgtgggaagcctgtgaggcccaaactcacagtcaccattgacaccaatgtgaacagcaccattctgaacttggaggataatgtacagtcatggaaacctggagataccctggtcattgccagtactgattactccatgtaccaggcagaagagttccaggtgcttccctgcagatcctgcgcccccaaccaggtcaaagtggcagggaaaccaatgtacctgcacatcggggaggagatagacggcgtggacatgcgggcggaggttgggcttctgagccggaacatcatagtgatgggggagatggaggacaaatgctacccctacagaaaccacatctgcaatttctttgacttcgatacctttgggggccacatcaagtttgctctgggatttaaggcagcacacttggagggcacggagctgaagcatatgggacagcagctggtgggtcagtacccgattcacttccacctggccggtgatgtagacgaaaggggaggttatgacccacccacatacatcagggacctctccatccatcatacattctctcgctgcgtcacagtccatggctccaatggcttgttgatcaaggacgttgtgggctataactctttgggccactgcttcttcacggaagatgggccggaggaacgcaacacttttgaccactgtcttggcctccttgtcaagtctggaaccctcctcccctcggaccgtgacagcaagatgtgcaagatgatcacagaggactcctacccagggtacatccccaagcccaggcaagactgcaatgctgtgtccaccttctggatggccaatcccaacaacaacctcatcaactgtgccgctgcaggatctgaggaaactggattttggtttatttttcaccacgtaccaacgggcccctccgtgggaatgtactccccaggttattcagagcacattccactgggaaaattctataacaaccgagcacattccaactaccgggctggcatgatcatagacaacggagtcaaaaccaccgaggcctctgccaaggacaagcggccgttcctctcaatcatctctgccagatacagccctcaccaggacgccgacccgctgaagccccgggagccggccatcatcagacacttcattgcctacaagaaccaggaccacggggcctggctgcgcggcggggatgtgtggctggacagctgccggtttgctgacaatggcattggcctgaccctggccagtggtggaaccttcccgtatgacgacggctccaagcaagagataaagaacagcttgtttgttggcgagagtggcaacgtggggacggaaatgatggacaataggatctggggccctggcggcttggaccatagcggaaggaccctccctataggccagaattttccaattagaggaattcagttatatgatggccccatcaacatccaaaactgcactttccgaaagtttgtggccctggagggccggcacaccagcgccctggccttccgcctgaataatgcctggcagagctgcccccataacaacgtgaccggcattgcctttgaggacgttccgattacttccagagtgttcttcggagagcctgggccctggttcaaccagctggacatggatggggataagacatctgtgttccatgacgtcgacggctccgtgtccgagtaccctggctcctacctcacgaagaatgacaactggctggtccggcacccagactgcatcaatgttcccgactggagaggggccatttgcagtgggtgctatgcacagatgtacattcaagcctacaagaccagtaacctgcgaatgaagatcatcaagaatgacttccccagccaccctctttacctggagggggcgctcaccaggagcacccattaccagcaataccaaccggttgtcaccctgcagaagggctacaccatccactgggaccagacggcccccgccgaactcgccatctggctcatcaacttcaacaagggcgactggatccgagtggggctctgctacccgcgaggcaccacattctccatcctctcggatgttcacaatcgcctgctgaagcaaacgtccaagacgggcgtcttcgtgaggaccttgcagatggacaaagtggagcagagctaccctggcaggagccactactactgggacgaggactcagggctgttgttcctgaagctgaaagctcagaacgagagagagaagtttgctttctgctccatgaaaggctgtgagaggataaagattaaagctctgattccaaagaacgcaggcgtcagtgactgcacagccacagcttaccccaagttcaccgagagggctgtcgtagacgtgccgatgcccaagaagctctttggttctcagctgaaaacaaaggaccatttcttggaggtgaagatggagagttccaagcagcacttcttccacctctggaacgacttcgcttacattgaagtggatgggaagaagtaccccagttcggaggatggcatccaggtggtggtgattgacgggaaccaagggcgcgtggtgagccacacgagcttcaggaactccattctgcaaggcataccatggcagcttttcaactatgtggcgaccatccctgacaattccatagtgcttatggcatcaaagggaagatacgtctccagaggcccatggaccagagtgctggaaaagcttggggcagacaggggtctcaagttgaaagagcaaatggcattcgttggcttcaaaggcagcttccggcccatctgggtgacactggacactgaggatcacaaagccaaaatcttccaagttgtgcccatccctgtggtgaagaagaagaagttgctcgagggc

SEQ ID NO: 134 - protein, 1014 aa, Homo sapiens
AHPGKICNRPIDIQATTMDGVNLSTEVVYKKGQDYRFACYDRGRACRSYRVRFLCGKPVRPKLTVTIDTNVNSTILNLEDNVQSWKPGDTLVIASTDYSMYQAEEFQVLPCRSCAPNQVKVAGKPMYLHIGEEIDGVDMRAEVGLLSRNIIVMGEMEDKCYPYRNHICNFFDFDTFGGHIKFALGFKAAHLEGTELKHMGQQLVGQYPIHFHLAGDVDERGGYDPPTYIRDLSIHHTFSRCVTVHGSNGLLIKDVVGYNSLGHCFFTEDGPEERNTFDHCLGLLVKSGTLLPSDRDSKMCKMITEDSYPGYIPKPRQDCNAVSTFWMANPNNNLINCAAAGSEETGFWFIFHHVPTGPSVGMYSPGYSEHIPLGKFYNNRAHSNYRAGMIIDNGVKTTEASAKDKRPFLSIISARYSPHQDADPLKPREPAIIRHFIAYKNQDHGAWLRGGDVWLDSCRFADNGIGLTLASGGTFPYDDGSKQEIKNSLFVGESGNVGTEMMDNRIWGPGGLDHSGRTLPIGQNFPIRGIQLYDGPINIQNCTFRKFVALEGRHTSALAFRLNNAWQSCPHNNVTGIAFEDVPITSRVFFGEPGPWFNQLDMDGDKTSVFHDVDGSVSEYPGSYLTKNDNWLVRHPDCINVPDWRGAICSGCYAQMYIQAYKTSNLRMKIIKNDFPSHPLYLEGALTRSTHYQQYQPVVTLQKGYTIHWDQTAPAELAIWLINFNKGDWIRVGLCYPRGTTFSILSDVHNRLLKQTSKTGVFVRTLQMDKVEQSYPGRSHYYWDEDSGLLFLKLKAQNEREKFAFCSMKGCERIKIKALIPKNAGVSDCTATAYPKFTERAVVDVPMPKKLFGSQLKTKDHFLEVKMESSKQHFFHLWNDFAYIEVDGKKYPSSEDGIQVVVIDGNQGRVVSHTSFRNSILQGIPWQLFNYVATIPDNSIVLMASKGRYVSRGPWTRVLEKLGADRGLKLKEQMAFVGFKGSFRPIWVTLDTEDHKAKIFQVVPIPVVKKKKLL

SEQ ID NO: 135 - DNA, 3997 bp, Homo sapiens
  CDS (11)..(3991)
caccagatcttgccctgaccagagccctgagttgcaaccctggaaccctggccatgaccaagaccaccatgtgcatatcggccagggcaagacactgctgctcacctcttctgccacggtctattccatccacatctcagagggaggcaagctggtcattaaagaccacgacgagccgattgttttgcgaacccggcacatcctgattgacaacggaggagagctgcatgctgggagtgccctctgccctttccagggcaatttcaccatcattttgtatggaagggctgatgaaggtattcagccggatccttactatggtctgaagtacattggggttggtaaaggaggcgctcttgagttgcatggacagaaaaagctctcctggacatttctgaacaagacccttcacccaggtggcatggcagaaggaggctatttttttgaaaggagctggggccaccgtggagttattgttcatgtcatcgaccccaaatcaggcacagtcatccattctgaccggtttgacacctatagatccaagaaagagagtgaacgtctggtccagtatttgaacgcggtgcccgatggcaggatcctttctgttgcagtgaatgatgaaggttctcgaaatctggatgacatggccaggaaggcgatgaccaaattgggaagcaaacacttcctgcaccttggatttagacacccttggagttttctaactgtgaaaggaaatccatcatcttcagtggaagaccatattgaatatcatggacatcgaggctctgctgctgcccgggtattcaaattgttccagacagagcatggcgaatatttcaatgtttctttgtccagtgagtgggttcaagacgtggagtggacggagtggttcgatcatgataaagtatctcagactaaaggtggggagaaaatttcagacctctggaaagctcacccaggaaaaatatgcaatcgtcccattgatatacaggccactacaatggatggagttaacctcagcaccgaggttgtctacaaaaaaggccaggattataggtttgcttgctacgaccggggcagagcctgccggagctaccgtgtacggttcctctgtgggaagcctgtgaggcccaaactcacagtcaccattgacaccaatgtgaacagcaccattctgaacttggaggataatgtacagtcatggaaacctggagataccctggtcattgccagtactgattactccatgtaccaggcagaagagttccaggtgcttccctgcagatcctgcgcccccaaccaggtcaaagtggcagggaaaccaatgtacctgcacatcggggaggagatagacggcgtggacatgcgggcggaggttgggcttctgagccggaacatcatagtgatgggggagatggaggacaaatgctacccctacagaaaccacatctgcaatttctttgacttcgatacctttgggggccacatcaagtttgctctgggatttaaggcagcacacttggagggcacggagctgaagcatatgggacagcagctggtgggtcagtacccgattcacttccacctggccggtgatgtagacgaaaggggaggttatgacccacccacatacatcagggacctctccatccatcatacattctctcgctgcgtcacagtccatggctccaatggcttgttgatcaaggacgttgtgggctataactctttgggccactgcttcttcacggaagatgggccggaggaacgcaacacttttgaccactgccttggcctccttgtcaagtctggaaccctcctcccctcggaccgtgacagcaagatgtgcaagatgatcacagaggactcctacccagggtacatccccaagcccaggcaagactgcaatgctgtgtccaccttctggatggccaatcccaacaacaacctcatcaactgtgccgctgcaggatctgaggaaactggattttggtttatttttcaccacgtaccaacgggcccctccgtgggaatgtactccccaggttattcagagcacattccactgggaaaattctataacaaccgagcacattccaactaccgggctggcatgatcatagacaacggagtcaaaaccaccgaggcctctgccaaggacaagcggccgttcctctcaatcatctctgccagatacagccctcaccaggacgccgacccgctgaagccccgggagccggccatcatcagacacttcattgcctacaagaaccaggaccacggggcctggctgcgcggcggggatgtgtggctggacagctgccggtttgctgacaatggcattggcctgaccctggccagtggtggaaccttcccgtatgacgacggctccaagcaagagataaagaacagcttgtttgttggcgagagtggcaacgtggggacggaaatgatggacaataggatctggggccctggcggcttggaccatagcggaaggaccctccctataggccagaattttccaattagaggaattcagttatatgatggccccatcaacatccaaaactgcactttccgaaagtttgtggccctggagggccggcacaccagcgccctggccttccgcctgaataatgcctggcagagctgcccccataacaacgtgaccggcattgcctttgaggacgttccgattacttccagagtgttcttcggagagcctgggccctggttcaaccagctggacatggatggggataagacatctgtgttccatgacgtcgacggctccgtgtccgagtaccctggctcctacctcacgaagaatggcaactggctggtccggcacccagactgcatcaatgttcccgactggagaggggccatttgcagtgggtgctatgcacagatgtacattcaagcctacaagaccagtaacctgcgaatgaagatcatcaagaatgacttccccagccaccctctttacctggagggggcgctcaccaggagcacccattaccagcaataccaaccggttgtcaccctgcagaagggctacaccatccactgggaccagacggcccccgccgaactcgccatctggctcatcaacttcaacaagggcgactggatccgagtggggctctgctacccgcgaggcaccacattctccatcctctcggatgttcacaatcgcctgctgaagcaaacgtccaagacgggcgtcttcgtgaggaccttgcagatggacaaagtggagcagagctaccctggcaggagccactactactgggacgaggactcagggctgttgttcctgaagctgaaagctcagaacgagagagagaagtttgctttctgctccatgaaaggctgtgagaggataaagattaaagctctgattccaaagaacgcaggcgtcagtgactgcacagccacagcttaccccaagttcaccgagagggctgtcgtagacgtgccgatgcccaagaagctctttggttctcagctgaaaacaaaggaccatttcttggaggtgaagatggagagttccaagcagcacttcttccacctctggaacgacttcgcttacattgaagtggatgggaagaagtaccccagttcggaggatggcatccaggtggtggtgattgacgggaaccaagggcgcgtggtgagccacacgagcttcaggaactccattctgcaaggcataccatggcagcttttcaactatgtggcgaccatccctgacaattccatagtgcttatggcatcaaagggaagatacgtctccagaggcccatggaccagagtgctggaaaagcttggggcagacaggggtctcaagttgaaagagcaaatggcattcgttggcttcaaaggcagcttccggcccatctgggtgacactggacactgaggatcacaaagccaaaatcttccaagttgtgcccatccctgtggtgaagaagaagaagttgctcgagggc

SEQ ID NO: 136 - protein, 1327 aa, Homo sapiens
CPDQSPELQPWNPGHDQDHHVHIGQGKTLLLTSSATVYSIHISEGGKLVIKDHDEPIVLRTRHILIDNGGELHAGSALCPFQGNFTIILYGRADEGIQPDPYYGLKYIGVGKGGALELHGQKKLSWTFLNKTLHPGGMAEGGYFFERSWGHRGVIVHVIDPKSGTVIHSDRFDTYRSKKESERLVQYLNAVPDGRILSVAVNDEGSRNLDDMARKAMTKLGSKHFLHLGFRHPWSFLTVKGNPSSSVEDHIEYHGHRGSAAARVFKLFQTEHGEYFNVSLSSEWVQDVEWTEWFDHDKVSQTKGGEKISDLWKAHPGKICNRPIDIQATTMDGVNLSTEVVYKKGQDYRFACYDRGRACRSYRVRFLCGKPVRPKLTVTIDTNVNSTILNLEDNVQSWKPGDTLVIASTDYSMYQAEEFQVLPCRSCAPNQVKVAGKPMYLHIGEEIDGVDMRAEVGLLSRNIIVMGEMEDKCYPYRNHICNFFDFDTFGGHIKFALGFKAAHLEGTELKHMGQQLVGQYPIHFHLAGDVDERGGYDPPTYIRDLSIHHTFSRCVTVHGSNGLLIKDVVGYNSLGHCFFTEDGPEERNTFDHCLGLLVKSGTLLPSDRDSKMCKMITEDSYPGYIPKPRQDCNAVSTFWMANPNNNLINCAAAGSEETGFWFIFHHVPTGPSVGMYSPGYSEHIPLGKFYNNRAHSNYRAGMIIDNGVKTTEASAKDKRPFLSIISARYSPHQDADPLKPREPAIIRHFIAYKNQDHGAWLRGGDVWLDSCRFADNGIGLTLASGGTFPYDDGSKQEIKNSLFVGESGNVGTEMMDNRIWGPGGLDHSGRTLPIGQNFPIRGIQLYDGPINIQNCTFRKFVALEGRHTSALAFRLNNAWQSCPHNNVTGIAFEDVPITSRVFFGEPGPWFNQLDMDGDKTSVFHDVDGSVSEYPGSYLTKNGNWLVRHPDCINVPDWRGAICSGCYAQMYIQAYKTSNLRMKIIKNDFPSHPLYLEGALTRSTHYQQYQPVVTLQKGYTIHWDQTAPAELAIWLINFNKGDWIRVGLCYPRGTTFSILSDVHNRLLKQTSKTGVFVRTLQMDKVEQSYPGRSHYYWDEDSGLLFLKLKAQNEREKFAFCSMKGCERIKIKALIPKNAGVSDCTATAYPKFTERAVVDVPMPKKLFGSQLKTKDHFLEVKMESSKQHFFHLWNDFAYIEVDGKKYPSSEDGIQVVVIDGNQGRVVSHTSFRNSILQGIPWQLFNYVATIPDNSIVLMASKGRYVSRGPWTRVLEKLGADRGLKLKEQMAFVGFKGSFRPIWVTLDTEDHKAKIFQVVPIPVVKKKKLL

SEQ ID NO: 137 - DNA, 619 bp, Homo sapiens
  CDS (1)..(603)
gctgcctgcctcctcatgttcccctccaccacagcggactgcctgtcgcggtgctccttgtgtgctgtaaagacccaggatggtcccaaacctatcaatcccctgatttgctccctgcaatgccaggctgccctgctgccctctgaggaatgggagagatgccagagctttctgtcttttttcaccccctccacccttgggctcaatgacaaggaggacttggggagcaagtcggttggggaagggccctacagtgagctggccaagctctctgggtcattcctgaaggagctgaacgatggtgccatggagactggcacactctatctcgctgaggaggaccccaaggagcaggtcaaacgctatgggggctttttgcgcaaataccccaagaggagctcagaggtggctggggagggggacggggatagcatgggccatgaggacctgtacaaacgctatgggggcttcttgcggcgcattcgtcccaagctcaagtgggacaaccagaagcgctatggcggttttctccggcgccagttcaaggtggtgactcggtctcaggaagatccgaatgcttactctggagagctttttgatgcataagcacttcttttca

SEQ ID NO: 138 - protein, 201 aa, Homo sapiens
AACLLMFPSTTADCLSRCSLCAVKTQDGPKPINPLICSLQCQAALLPSEEWERCQSFLSFFTPSTLGLNDKEDLGSKSVGEGPYSELAKLSGSFLKELNDGAMETGTLYLAEEDPKEQVKRYGGFLRKYPKRSSEVAGEGDGDSMGHEDLYKRYGGFLRRIRPKLKWDNQKRYGGFLRRQFKVVTRSQEDPNAYSGELFDA

SEQ ID NO: 139 - DNA, 758 bp, Homo sapiens
  CDS (16)..(378)
tctgcctgcctcctcatgttcccctccaccacagcggactgcctgtcgcggtgctccttgtgtgctgtaaagacccaggatggtcccaaacctatcaatcccctgatttgctccctgcaatgccaggctgccctgctgccctctgaggaatgggagagatgccagagctttctgtcttttttcaccccctccacccttgggctcaatgacaaggaggacttggggagcaagtcggttggggaagggccctacagtgagctggccaagctctctgggtcattcctgaaggagctggagaaaagcaagttttctcccaagtatctcaacaaaggagaacactctgagcaagagcctggaggagaagctcaggggtctctctgacgggtttagggagggagcagagtctgagctgatgagggatgcccagctgaacgatggtgccatggagactggcacactctatctcgctgaggaggaccccaaggagcaggtcaaacgctatgggggctttttgcgcaaataccccaagaggagctcagaggtggctggggagggggacggggatagcatgggccatgaggacctgtacaaacgctatgggggcttcttgcggcgcattcgtcccaagctcaagtgggacaaccagaagcgctatggcggttttctccggcgccagttcaaggtggtgactcggtctcaggaagatccgaatgcttactctggagagctttttgatgcataagcacctcttttcatga

SEQ ID NO: 140 - protein, 121 aa, Homo sapiens
MFPSTTADCLSRCSLCAVKTQDGPKPINPLICSLQCQAALLPSEEWERCQSFLSFFTPSTLGLNDKEDLGSKSVGEGPYSELAKLSGSFLKELEKSKFSPKYLNKGEHSEQEPGGEAQGSL

SEQ ID NO: 141 - DNA, 603 bp, Homo sapiens
  CDS (1)..(603)
gctgcctgcctcctcatgttcccctccaccacagcggactgcctgtcgcggtgctccttgtgtgctgtaaagacccaggatggtcccaaacctatcaatcccctgatttgctccctgcaatgccaggctgccctgctgccctctgaggaatgggagagatgccagagctttctgtcttttttcaccccctccacccttgggctcaatgacaaggaggacttggggagcaagtcggttggggaagggccctacagtgagctggccaagctctctgggtcattcctgaaggagctgaacgatggtgccatggagactggcacactctatctcgctgaggaggaccccaaggagcaggtcaaacgctatgggggctttttgcgcaaataccccaagaggagctcagaggtggctggggagggggacggggatagcatgggccatgaggacctgtacaaacgctatgggggcttcttgcggcgcattcgtcccaagctcaagtgggacaaccagaagcgctatggcggttttctccggcgccagttcaaggtggtgactcggtctcaggaagatccgaatgcttactctggagagctttttgatgca

SEQ ID NO: 142 - protein, 201 aa, Homo sapiens; identical to SEQ ID NO: 138

SEQ ID NO: 143 - DNA, 21 bp, Artificial Sequence
  Description of Artifical Sequence:  Primer/Probe
ctgaagcacatcgtcatcaac

SEQ ID NO: 144 - DNA, 26 bp, Artificial Sequence
  Description of Artifical Sequence:  Primer/Probe
cggtttcccctatgtgcaagtcctaa

SEQ ID NO: 145 - DNA, 22 bp, Artificial Sequence
  Description of Artifical Sequence:  Primer/Probe
ctccacctctgagctattgatg

SEQ ID NO: 146 - DNA, 22 bp, Artificial Sequence
  Description of Artifical Sequence:  Primer/Probe
cgtcaagatgctcaaagacaac

SEQ ID NO: 147 - DNA, 24 bp, Artificial Sequence
  Description of Artifical Sequence:  Primer/Probe
ctctgacaaggacctggccgacct

SEQ ID NO: 148 - DNA, 21 bp, Artificial Sequence
  Description of Artifical Sequence:  Primer/Probe
gatcagcttcatcacctccat

SEQ ID NO: 149 - DNA, 17 bp, Artificial Sequence
  Description of Artifical Sequence:  Primer/Probe
cgtgcgtctctcctcca

SEQ ID NO: 150 - DNA, 21 bp, Artificial Sequence
  Description of Artifical Sequence:  Primer/Probe
cttcccaagcaccagcgaggc

SEQ ID NO: 151 - DNA, 20 bp, Artificial Sequence
  Description of Artifical Sequence:  Primer/Probe
cacgtactacctggccaaag

SEQ ID NO: 152 - DNA, 21 bp, Artificial Sequence
  Description of Artifical Sequence:  Primer/Probe
gctactggctctttcgagaag

SEQ ID NO: 153 - DNA, 25 bp, Artificial Sequence
  Description of Artifical Sequence:  Primer/Probe
ctacccacagccgctgaccagctat

SEQ ID NO: 154 - DNA, 19 bp, Artificial Sequence
  Description of Artifical Sequence:  Primer/Probe
cgtgtcaatgcggtcatag

SEQ ID NO: 155 - DNA, 21 bp, Artificial Sequence
  Description of Artifical Sequence:  Primer/Probe
gtggaaggacgttgacaactt

SEQ ID NO: 156 - DNA, 26 bp, Artificial Sequence
  Description of Artifical Sequence:  Primer/Probe
atctccgtggcatccagcagctctac

SEQ ID NO: 157 - DNA, 21 bp, Artificial Sequence
  Description of Artifical Sequence:  Primer/Probe
tggactctgcatttccaagtt

SEQ ID NO: 158 - DNA, 20 bp, Artificial Sequence
  Description of Artifical Sequence:  Primer/Probe
gaccagccagcacagaaacc

SEQ ID NO: 159 - DNA, 23 bp, Artificial Sequence
  Description of Artifical Sequence:  Primer/Probe
agtgctcgaacccggtctcgtcc

SEQ ID NO: 160 - DNA, 18 bp, Artificial Sequence
  Description of Artifical Sequence:  Primer/Probe
ggacccgagccattgatg

SEQ ID NO: 161 - DNA, 20 bp, Artificial Sequence
  Description of Artifical Sequence:  Primer/Probe
gaccagccagcacagaaacc

SEQ ID NO: 162 - DNA, 24 bp, Artificial Sequence
  Description of Artifical Sequence:  Primer/Probe
tcctgagtgctcgaacccggtctc

SEQ ID NO: 163 - DNA, 18 bp, Artificial Sequence
  Description of Artifical Sequence:  Primer/Probe
ggacccgagccattgatg

SEQ ID NO: 164 - DNA, 22 bp, Artificial Sequence
  Description of Artifical Sequence:  Primer/Probe
cctggaaatagggtaccagaag

SEQ ID NO: 165 - DNA, 26 bp, Artificial Sequence
  Description of Artifical Sequence:  Primer/Probe
acacagcaatggctcatacagtgcct

SEQ ID NO: 166 - DNA, 20 bp, Artificial Sequence
  Description of Artifical Sequence:  Primer/Probe
tcagccatgtgtttccattt

SEQ ID NO: 167 - DNA, 22 bp, Artificial Sequence
  Description of Artifical Sequence:  Primer/Probe
cctggaaatagggtaccagaag

SEQ ID NO: 168 - DNA, 26 bp, Artificial Sequence
  Description of Artifical Sequence:  Primer/Probe
acacagcaatggctcatacagtgcct

SEQ ID NO: 169 - DNA, 20 bp, Artificial Sequence
  Description of Artifical Sequence:  Primer/Probe
tcagccatgtgtttccattt

SEQ ID NO: 170 - DNA, 20 bp, Artificial Sequence
  Description of Artifical Sequence:  Primer/Probe
tgccttcaccatgaagtcca

SEQ ID NO: 171 - DNA, 23 bp, Artificial Sequence
  Description of Artifical Sequence:  Primer/Probe
cttcctggtgctgcttgccctgg

SEQ ID NO: 172 - DNA, 19 bp, Artificial Sequence
  Description of Artifical Sequence:  Primer/Probe
agcccaaggtgccagagtt

SEQ ID NO: 173 - DNA, 22 bp, Artificial Sequence
  Description of Artifical Sequence:  Primer/Probe
cccgaaaaggctttatgtattc

SEQ ID NO: 174 - DNA, 27 bp, Artificial Sequence
  Description of Artifical Sequence:  Primer/Probe
cagaaacacaaatgaaaatcctcagga

SEQ ID NO: 175 - DNA, 22 bp, Artificial Sequence
  Description of Artifical Sequence:  Primer/Probe
tgtcagtagctttgatgcattg

SEQ ID NO: 176 - DNA, 19 bp, Artificial Sequence
  Description of Artifical Sequence:  Primer/Probe
atacacagacgcgctcaca

SEQ ID NO: 177 - DNA, 26 bp, Artificial Sequence
  Description of Artifical Sequence:  Primer/Probe
ctccctcactcgaacacacagacaca

SEQ ID NO: 178 - DNA, 20 bp, Artificial Sequence
  Description of Artifical Sequence:  Primer/Probe
ggagagcgaagtgtgtgtgt

SEQ ID NO: 179 - DNA, 20 bp, Artificial Sequence
  Description of Artifical Sequence:  Primer/Probe
ctgaggatcacaaagccaaa

SEQ ID NO: 180 - DNA, 26 bp, Artificial Sequence
  Description of Artifical Sequence:  Primer/Probe
atcttccaagttgtgcccatccctgt

SEQ ID NO: 181 - DNA, 22 bp, Artificial Sequence
  Description of Artifical Sequence:  Primer/Probe
cagctgtcctcacaacttcttc

SEQ ID NO: 182 - DNA, 20 bp, Artificial Sequence
  Description of Artifical Sequence:  Primer/Probe
cctgaaggagctgaacgatg

SEQ ID NO: 183 - DNA, 26 bp, Artificial Sequence
  Description of Artifical Sequence:  Primer/Probe
ccatggagactggcacactctatctc

SEQ ID NO: 184 - DNA, 20 bp, Artificial Sequence
  Description of Artifical Sequence:  Primer/Probe
tagcgtttgacctgctcctt

SEQ ID NO: 185 - DNA, 30 bp, Artificial Sequence
  Description of Artifical Sequence:  Primer/Probe
taaaggtctccacagagtttatgccatatt

SEQ ID NO: 186 - DNA, 30 bp, Artificial Sequence
  Description of Artifical Sequence:  Primer/Probe
atgctgtgaacgagtgtgatattactgaat

SEQ ID NO: 187 - DNA, 30 bp, Artificial Sequence
  Description of Artifical Sequence:  Primer/Probe
acttatagcgtttcctcctcgaaattctac

1. An isolated polypeptide comprising the mature form of an amino acid sequence selected from the group consisting of SEQ ID NO:2n, wherein n is an integer between 1 and 71 or is 94.

2. A composition comprising the polypeptide of claim 1 and a carrier.

3. A kit comprising, in one or more containers, the composition of claim 2.

4. A method for determining the presence or amount of the polypeptide of claim 1 in a sample, the method comprising:
(a) providing the sample;
(b) introducing the sample to an antibody that binds immunospecifically to the polypeptide; and
(c) determining the presence or amount of the antibody bound to the polypeptide,
wherein the presence or amount of the antibody indicates the presence or amount of the polypeptide in the sample.

5. A method for determining the presence of or predisposition to a disease associated with altered levels of expression of the polypeptide of claim 1 in a first mammalian subject, the method comprising:
a) measuring the level of expression of the polypeptide in a sample from the first mammalian subject; and
b) comparing the expression of the polypeptide in the sample of step (a) to the expression of the polypeptide present in a control sample from a second mammalian subject known not to have, or not to be predisposed to the disease,
wherein an alteration in the level of expression of the polypeptide in the first subject as compared to the control sample indicates the presence of or predisposition to the disease.

6. A method of identifying an agent that binds to the polypeptide of claim 1, the method comprising:
(a) introducing the polypeptide to the agent; and
(b) determining whether the agent binds to the polypeptide.

7. The method of claim 6 wherein the agent is a cellular receptor or a downstream effector.

8. A method for identifying a potential therapeutic agent for use in treatment of a pathology, wherein the pathology is related to aberrant expression or aberrant physiological interactions of the polypeptide of claim 1, the method comprising:
(a) providing a cell expressing the polypeptide of claim 1 and having a property or function ascribable to the polypeptide;
(b) contacting the cell with a composition comprising a candidate substance; and
(c) determining whether the substance alters the property or function ascribable to the polypeptide;
whereby, if an alteration observed in the presence of the substance is not observed when the cell is contacted with a composition in the absence of the substance, the substance is identified as a potential therapeutic agent.

9. A method for screening for a modulator of activity of or of latency or predisposition to a pathology associated with the polypeptide of claim 1, the method comprising:
(a) administering a test compound to a test animal at increased risk for a pathology associated with the polypeptide of claim 1, wherein the test animal recombinantly expresses the polypeptide of claim 1;
(b) measuring the activity of the polypeptide in the test animal after administering the compound of step (a); and
(c) comparing the activity of the polypeptide in the test animal with the activity of the polypeptide in a control animal not administered the compound, wherein a change in the activity of the polypeptide in the test animal relative to the control animal indicates the test compound is a modulator of activity of or latency or predisposition to, a pathology associated with the polypeptide of claim 1.

10. The method of claim 9, wherein said test animal is a recombinant test animal that expresses the polypeptide as a transgene or expresses the transgene under the control of a promoter at an increased level relative to a wild-type test animal, and wherein the promoter is not the native gene promoter of the transgene.

11. An antibody that immunospecifically binds to the polypeptide of claim 1.

12. The antibody of claim 11, wherein the antibody is a human monoclonal antibody.

13. A method of producing the polypeptide of claim 1, the method comprising culturing a cell under conditions that lead to expression of the polypeptide, wherein said cell comprises a vector comprising an isolated nucleic acid molecule comprising a nucleic acid sequence selected from the group consisting of SEQ ID NO:2n-1, wherein n is an integer between 1 and 71.

14. The method of claim 13 wherein the cell is chosen from the group comprising a bacterial cell, an insect cell, a yeast cell and a mammalian cell.

15. An isolated polypeptide comprising an amino acid sequence selected from the group consisting of SEQ ID NO:2n, wherein n is an integer between 1 and 71 or is 94.

16. A method of treating a pathological state in a mammal, the method comprising administering to the mammal a polypeptide in an amount that is sufficient to alleviate the pathological state, wherein the polypeptide comprises the amino acid sequence selected from the group consisting of SEQ ID NO:2n, wherein n is an integer between 1 and 71 or is 94, or a biologically active fragment thereof.

17. An isolated nucleic acid molecule comprising a nucleic acid sequence selected from the group consisting of SEQ ID NO:2n-1, wherein n is an integer between 1 and 71.

18. An isolated nucleic acid molecule encoding the mature form of a polypeptide having an amino acid sequence selected from the group consisting of SEQ ID NO:2n, wherein n is an integer between 1 and 71 or is 94.

19. A vector comprising the nucleic acid molecule of claim 18.

20. A cell comprising the vector of claim 19.
